United States Patent Application Publication US 2004/0077565 A1 - sequence listing, part 2

SEQ ID NO: 15855 - RNA, 38 nt, Artificial Sequence
  Description of Artificial Sequence:  Enzymatic Nucleic Acid
  misc_feature (31)..(31): n stands for inosine
auucuccacugaugaggccguuaggccgaanuuuccug

SEQ ID NO: 15856 - RNA, 38 nt, Artificial Sequence
  Description of Artificial Sequence:  Enzymatic Nucleic Acid
  misc_feature (31)..(31): n stands for inosine
gauucucccugaugaggccguuaggccgaanguuuccu

SEQ ID NO: 15857 - RNA, 38 nt, Artificial Sequence
  Description of Artificial Sequence:  Enzymatic Nucleic Acid
  misc_feature (31)..(31): n stands for inosine
uugucguccugaugaggccguuaggccgaanauucucc

SEQ ID NO: 15858 - RNA, 38 nt, Artificial Sequence
  Description of Artificial Sequence:  Enzymatic Nucleic Acid
  misc_feature (31)..(31): n stands for inosine
ccaauacucugaugaggccguuaggccgaanucgucug

SEQ ID NO: 15859 - RNA, 38 nt, Artificial Sequence
  Description of Artificial Sequence:  Enzymatic Nucleic Acid
  misc_feature (31)..(31): n stands for inosine
gacuucgacugaugaggccguuaggccgaancuuuccc

SEQ ID NO: 15860 - RNA, 38 nt, Artificial Sequence
  Description of Artificial Sequence:  Enzymatic Nucleic Acid
  misc_feature (31)..(31): n stands for inosine
cgugcaugcugaugaggccguuaggccgaanacuucga

SEQ ID NO: 15861 - RNA, 38 nt, Artificial Sequence
  Description of Artificial Sequence:  Enzymatic Nucleic Acid
  misc_feature (31)..(31): n stands for inosine
gccgugcacugaugaggccguuaggccgaanagacuuc

SEQ ID NO: 15862 - RNA, 38 nt, Artificial Sequence
  Description of Artificial Sequence:  Enzymatic Nucleic Acid
  misc_feature (31)..(31): n stands for inosine
agaugccgcugaugaggccguuaggccgaancaugaga

SEQ ID NO: 15863 - RNA, 38 nt, Artificial Sequence
  Description of Artificial Sequence:  Enzymatic Nucleic Acid
  misc_feature (31)..(31): n stands for inosine
uucccagacugaugaggccguuaggccgaanccgugca

SEQ ID NO: 15864 - RNA, 38 nt, Artificial Sequence
  Description of Artificial Sequence:  Enzymatic Nucleic Acid
  misc_feature (31)..(31): n stands for inosine
ggauuccccugaugaggccguuaggccgaanaugccgu

SEQ ID NO: 15865 - RNA, 38 nt, Artificial Sequence
  Description of Artificial Sequence:  Enzymatic Nucleic Acid
  misc_feature (31)..(31): n stands for inosine
guggagggcugaugaggccguuaggccgaanauuccca

SEQ ID NO: 15866 - RNA, 38 nt, Artificial Sequence
  Description of Artificial Sequence:  Enzymatic Nucleic Acid
  misc_feature (31)..(31): n stands for inosine
uguggaggcugaugaggccguuaggccgaangauuccc

SEQ ID NO: 15867 - RNA, 38 nt, Artificial Sequence
  Description of Artificial Sequence:  Enzymatic Nucleic Acid
  misc_feature (31)..(31): n stands for inosine
cuguggagcugaugaggccguuaggccgaanggauucc

SEQ ID NO: 15868 - RNA, 38 nt, Artificial Sequence
  Description of Artificial Sequence:  Enzymatic Nucleic Acid
  misc_feature (31)..(31): n stands for inosine
ucuguggacugaugaggccguuaggccgaangggauuc

SEQ ID NO: 15869 - RNA, 38 nt, Artificial Sequence
  Description of Artificial Sequence:  Enzymatic Nucleic Acid
  misc_feature (31)..(31): n stands for inosine
aucuguggcugaugaggccguuaggccgaanggggauu

SEQ ID NO: 15870 - RNA, 38 nt, Artificial Sequence
  Description of Artificial Sequence:  Enzymatic Nucleic Acid
  misc_feature (31)..(31): n stands for inosine
ugaucugucugaugaggccguuaggccgaanaggggga

SEQ ID NO: 15871 - RNA, 38 nt, Artificial Sequence
  Description of Artificial Sequence:  Enzymatic Nucleic Acid
  misc_feature (31)..(31): n stands for inosine
augaucugcugaugaggccguuaggccgaangaggggg

SEQ ID NO: 15872 - RNA, 38 nt, Artificial Sequence
  Description of Artificial Sequence:  Enzymatic Nucleic Acid
  misc_feature (31)..(31): n stands for inosine
acaugauccugaugaggccguuaggccgaanuggaggg

SEQ ID NO: 15873 - RNA, 38 nt, Artificial Sequence
  Description of Artificial Sequence:  Enzymatic Nucleic Acid
  misc_feature (31)..(31): n stands for inosine
aaaccacacugaugaggccguuaggccgaanaucugug

SEQ ID NO: 15874 - RNA, 38 nt, Artificial Sequence
  Description of Artificial Sequence:  Enzymatic Nucleic Acid
  misc_feature (31)..(31): n stands for inosine
ucuacaagcugaugaggccguuaggccgaanucucauu

SEQ ID NO: 15875 - RNA, 38 nt, Artificial Sequence
  Description of Artificial Sequence:  Enzymatic Nucleic Acid
  misc_feature (31)..(31): n stands for inosine
uucuacaacugaugaggccguuaggccgaangucucau

SEQ ID NO: 15876 - RNA, 38 nt, Artificial Sequence
  Description of Artificial Sequence:  Enzymatic Nucleic Acid
  misc_feature (31)..(31): n stands for inosine
cuucuacacugaugaggccguuaggccgaanggucuca

SEQ ID NO: 15877 - RNA, 38 nt, Artificial Sequence
  Description of Artificial Sequence:  Enzymatic Nucleic Acid
  misc_feature (31)..(31): n stands for inosine
aaugccugcugaugaggccguuaggccgaanucuucua

SEQ ID NO: 15878 - RNA, 38 nt, Artificial Sequence
  Description of Artificial Sequence:  Enzymatic Nucleic Acid
  misc_feature (31)..(31): n stands for inosine
acaaugcccugaugaggccguuaggccgaanagucuuc

SEQ ID NO: 15879 - RNA, 38 nt, Artificial Sequence
  Description of Artificial Sequence:  Enzymatic Nucleic Acid
  misc_feature (31)..(31): n stands for inosine
caauacaacugaugaggccguuaggccgaanccugagu

SEQ ID NO: 15880 - RNA, 38 nt, Artificial Sequence
  Description of Artificial Sequence:  Enzymatic Nucleic Acid
  misc_feature (31)..(31): n stands for inosine
gagguucccugaugaggccguuaggccgaanuucccau

SEQ ID NO: 15881 - RNA, 38 nt, Artificial Sequence
  Description of Artificial Sequence:  Enzymatic Nucleic Acid
  misc_feature (31)..(31): n stands for inosine
gauagugacugaugaggccguuaggccgaanuuccggu

SEQ ID NO: 15882 - RNA, 38 nt, Artificial Sequence
  Description of Artificial Sequence:  Enzymatic Nucleic Acid
  misc_feature (31)..(31): n stands for inosine
ggauagugcugaugaggccguuaggccgaanguuccgg

SEQ ID NO: 15883 - RNA, 38 nt, Artificial Sequence
  Description of Artificial Sequence:  Enzymatic Nucleic Acid
  misc_feature (31)..(31): n stands for inosine
gcggauagcugaugaggccguuaggccgaanagguucc

SEQ ID NO: 15884 - RNA, 38 nt, Artificial Sequence
  Description of Artificial Sequence:  Enzymatic Nucleic Acid
  misc_feature (31)..(31): n stands for inosine
cugcggaucugaugaggccguuaggccgaanugagguu

SEQ ID NO: 15885 - RNA, 38 nt, Artificial Sequence
  Description of Artificial Sequence:  Enzymatic Nucleic Acid
  misc_feature (31)..(31): n stands for inosine
cacucugccugaugaggccguuaggccgaanauaguga

SEQ ID NO: 15886 - RNA, 38 nt, Artificial Sequence
  Description of Artificial Sequence:  Enzymatic Nucleic Acid
  misc_feature (31)..(31): n stands for inosine
ccucacuccugaugaggccguuaggccgaancggauag

SEQ ID NO: 15887 - RNA, 38 nt, Artificial Sequence
  Description of Artificial Sequence:  Enzymatic Nucleic Acid
  misc_feature (31)..(31): n stands for inosine
gguguagacugaugaggccguuaggccgaanccuucgu

SEQ ID NO: 15888 - RNA, 38 nt, Artificial Sequence
  Description of Artificial Sequence:  Enzymatic Nucleic Acid
  misc_feature (31)..(31): n stands for inosine
agguguagcugaugaggccguuaggccgaangccuucg

SEQ ID NO: 15889 - RNA, 38 nt, Artificial Sequence
  Description of Artificial Sequence:  Enzymatic Nucleic Acid
  misc_feature (31)..(31): n stands for inosine
gcaggugucugaugaggccguuaggccgaanaggccuu

SEQ ID NO: 15890 - RNA, 38 nt, Artificial Sequence
  Description of Artificial Sequence:  Enzymatic Nucleic Acid
  misc_feature (31)..(31): n stands for inosine
cuggcaggcugaugaggccguuaggccgaanuagaggc

SEQ ID NO: 15891 - RNA, 38 nt, Artificial Sequence
  Description of Artificial Sequence:  Enzymatic Nucleic Acid
  misc_feature (31)..(31): n stands for inosine
gccuggcacugaugaggccguuaggccgaanuguagag

SEQ ID NO: 15892 - RNA, 38 nt, Artificial Sequence
  Description of Artificial Sequence:  Enzymatic Nucleic Acid
  misc_feature (31)..(31): n stands for inosine
ugccuggccugaugaggccguuaggccgaanguguaga

SEQ ID NO: 15893 - RNA, 38 nt, Artificial Sequence
  Description of Artificial Sequence:  Enzymatic Nucleic Acid
  misc_feature (31)..(31): n stands for inosine
gcaugccucugaugaggccguuaggccgaancaggugu

SEQ ID NO: 15894 - RNA, 38 nt, Artificial Sequence
  Description of Artificial Sequence:  Enzymatic Nucleic Acid
  misc_feature (31)..(31): n stands for inosine
ugcaugcccugaugaggccguuaggccgaangcaggug

SEQ ID NO: 15895 - RNA, 38 nt, Artificial Sequence
  Description of Artificial Sequence:  Enzymatic Nucleic Acid
  misc_feature (31)..(31): n stands for inosine
acacugcacugaugaggccguuaggccgaanccuggca

SEQ ID NO: 15896 - RNA, 38 nt, Artificial Sequence
  Description of Artificial Sequence:  Enzymatic Nucleic Acid
  misc_feature (31)..(31): n stands for inosine
aagaacaccugaugaggccguuaggccgaancaugccu

SEQ ID NO: 15897 - RNA, 38 nt, Artificial Sequence
  Description of Artificial Sequence:  Enzymatic Nucleic Acid
  misc_feature (31)..(31): n stands for inosine
cacagccacugaugaggccguuaggccgaanaacacug

SEQ ID NO: 15898 - RNA, 38 nt, Artificial Sequence
  Description of Artificial Sequence:  Enzymatic Nucleic Acid
  misc_feature (31)..(31): n stands for inosine
uuuugcaccugaugaggccguuaggccgaanccaagaa

SEQ ID NO: 15899 - RNA, 38 nt, Artificial Sequence
  Description of Artificial Sequence:  Enzymatic Nucleic Acid
  misc_feature (31)..(31): n stands for inosine
uccacuuucugaugaggccguuaggccgaancacagcc

SEQ ID NO: 15900 - RNA, 38 nt, Artificial Sequence
  Description of Artificial Sequence:  Enzymatic Nucleic Acid
  misc_feature (31)..(31): n stands for inosine
augaaaaacugaugaggccguuaggccgaanccuccac

SEQ ID NO: 15901 - RNA, 38 nt, Artificial Sequence
  Description of Artificial Sequence:  Enzymatic Nucleic Acid
  misc_feature (31)..(31): n stands for inosine
uucuauuacugaugaggccguuaggccgaanaaaaaug

SEQ ID NO: 15902 - RNA, 38 nt, Artificial Sequence
  Description of Artificial Sequence:  Enzymatic Nucleic Acid
  misc_feature (31)..(31): n stands for inosine
uuuuccugcugaugaggccguuaggccgaancaccuuc

SEQ ID NO: 15903 - RNA, 38 nt, Artificial Sequence
  Description of Artificial Sequence:  Enzymatic Nucleic Acid
  misc_feature (31)..(31): n stands for inosine
cuuuuccucugaugaggccguuaggccgaangcaccuu

SEQ ID NO: 15904 - RNA, 38 nt, Artificial Sequence
  Description of Artificial Sequence:  Enzymatic Nucleic Acid
  misc_feature (31)..(31): n stands for inosine
ucuuuucccugaugaggccguuaggccgaanggcaccu

SEQ ID NO: 15905 - RNA, 38 nt, Artificial Sequence
  Description of Artificial Sequence:  Enzymatic Nucleic Acid
  misc_feature (31)..(31): n stands for inosine
gauuuccacugaugaggccguuaggccgaanuucgucu

SEQ ID NO: 15906 - RNA, 38 nt, Artificial Sequence
  Description of Artificial Sequence:  Enzymatic Nucleic Acid
  misc_feature (31)..(31): n stands for inosine
uagaauaacugaugaggccguuaggccgaanauuucca

SEQ ID NO: 15907 - RNA, 38 nt, Artificial Sequence
  Description of Artificial Sequence:  Enzymatic Nucleic Acid
  misc_feature (31)..(31): n stands for inosine
ugccuacucugaugaggccguuaggccgaanaauaaug

SEQ ID NO: 15908 - RNA, 38 nt, Artificial Sequence
  Description of Artificial Sequence:  Enzymatic Nucleic Acid
  misc_feature (31)..(31): n stands for inosine
caccgucgcugaugaggccguuaggccgaanccuacua

SEQ ID NO: 15909 - RNA, 38 nt, Artificial Sequence
  Description of Artificial Sequence:  Enzymatic Nucleic Acid
  misc_feature (31)..(31): n stands for inosine
aagaacaucugaugaggccguuaggccgaancaaucac

SEQ ID NO: 15910 - RNA, 38 nt, Artificial Sequence
  Description of Artificial Sequence:  Enzymatic Nucleic Acid
  misc_feature (31)..(31): n stands for inosine
gaagaacacugaugaggccguuaggccgaangcaauca

SEQ ID NO: 15911 - RNA, 38 nt, Artificial Sequence
  Description of Artificial Sequence:  Enzymatic Nucleic Acid
  misc_feature (31)..(31): n stands for inosine
uagccagacugaugaggccguuaggccgaanaacaugg

SEQ ID NO: 15912 - RNA, 38 nt, Artificial Sequence
  Description of Artificial Sequence:  Enzymatic Nucleic Acid
  misc_feature (31)..(31): n stands for inosine
aaguagcccugaugaggccguuaggccgaanaagaaca

SEQ ID NO: 15913 - RNA, 38 nt, Artificial Sequence
  Description of Artificial Sequence:  Enzymatic Nucleic Acid
  misc_feature (31)..(31): n stands for inosine
caagaagucugaugaggccguuaggccgaanccagaag

SEQ ID NO: 15914 - RNA, 38 nt, Artificial Sequence
  Description of Artificial Sequence:  Enzymatic Nucleic Acid
  misc_feature (31)..(31): n stands for inosine
ugacaagacugaugaggccguuaggccgaanuagccag

SEQ ID NO: 15915 - RNA, 38 nt, Artificial Sequence
  Description of Artificial Sequence:  Enzymatic Nucleic Acid
  misc_feature (31)..(31): n stands for inosine
ugaugacacugaugaggccguuaggccgaanaaguagc

SEQ ID NO: 15916 - RNA, 38 nt, Artificial Sequence
  Description of Artificial Sequence:  Enzymatic Nucleic Acid
  misc_feature (31)..(31): n stands for inosine
uaggaugacugaugaggccguuaggccgaanacaagaa

SEQ ID NO: 15917 - RNA, 38 nt, Artificial Sequence
  Description of Artificial Sequence:  Enzymatic Nucleic Acid
  misc_feature (31)..(31): n stands for inosine
cccuaggacugaugaggccguuaggccgaanaugacaa

SEQ ID NO: 15918 - RNA, 38 nt, Artificial Sequence
  Description of Artificial Sequence:  Enzymatic Nucleic Acid
  misc_feature (31)..(31): n stands for inosine
ggucccuacugaugaggccguuaggccgaanaugauga

SEQ ID NO: 15919 - RNA, 38 nt, Artificial Sequence
  Description of Artificial Sequence:  Enzymatic Nucleic Acid
  misc_feature (31)..(31): n stands for inosine
cggucccucugaugaggccguuaggccgaangaugaug

SEQ ID NO: 15920 - RNA, 38 nt, Artificial Sequence
  Description of Artificial Sequence:  Enzymatic Nucleic Acid
  misc_feature (31)..(31): n stands for inosine
cgcuuaaccugaugaggccguuaggccgaanucccuag

SEQ ID NO: 15921 - RNA, 38 nt, Artificial Sequence
  Description of Artificial Sequence:  Enzymatic Nucleic Acid
  misc_feature (31)..(31): n stands for inosine
ccuccauucugaugaggccguuaggccgaancccgcuu

SEQ ID NO: 15922 - RNA, 38 nt, Artificial Sequence
  Description of Artificial Sequence:  Enzymatic Nucleic Acid
  misc_feature (31)..(31): n stands for inosine
cccuccaucugaugaggccguuaggccgaangcccgcu

SEQ ID NO: 15923 - RNA, 38 nt, Artificial Sequence
  Description of Artificial Sequence:  Enzymatic Nucleic Acid
  misc_feature (31)..(31): n stands for inosine
cugucuuccugaugaggccguuaggccgaanuuccccu

SEQ ID NO: 15924 - RNA, 38 nt, Artificial Sequence
  Description of Artificial Sequence:  Enzymatic Nucleic Acid
  misc_feature (31)..(31): n stands for inosine
aaguagcccugaugaggccguuaggccgaanucuucag

SEQ ID NO: 15925 - RNA, 38 nt, Artificial Sequence
  Description of Artificial Sequence:  Enzymatic Nucleic Acid
  misc_feature (31)..(31): n stands for inosine
ggacaagucugaugaggccguuaggccgaanccugucu

SEQ ID NO: 15926 - RNA, 38 nt, Artificial Sequence
  Description of Artificial Sequence:  Enzymatic Nucleic Acid
  misc_feature (31)..(31): n stands for inosine
gauggacacugaugaggccguuaggccgaanuagccug

SEQ ID NO: 15927 - RNA, 38 nt, Artificial Sequence
  Description of Artificial Sequence:  Enzymatic Nucleic Acid
  misc_feature (31)..(31): n stands for inosine
augacgaucugaugaggccguuaggccgaanacaagua

SEQ ID NO: 15928 - RNA, 38 nt, Artificial Sequence
  Description of Artificial Sequence:  Enzymatic Nucleic Acid
  misc_feature (31)..(31): n stands for inosine
caugacgacugaugaggccguuaggccgaangacaagu

SEQ ID NO: 15929 - RNA, 38 nt, Artificial Sequence
  Description of Artificial Sequence:  Enzymatic Nucleic Acid
  misc_feature (31)..(31): n stands for inosine
uggauccacugaugaggccguuaggccgaanacgaugg

SEQ ID NO: 15930 - RNA, 38 nt, Artificial Sequence
  Description of Artificial Sequence:  Enzymatic Nucleic Acid
  misc_feature (31)..(31): n stands for inosine
guucaucucugaugaggccguuaggccgaanauccaug

SEQ ID NO: 15931 - RNA, 38 nt, Artificial Sequence
  Description of Artificial Sequence:  Enzymatic Nucleic Acid
  misc_feature (31)..(31): n stands for inosine
aguucauccugaugaggccguuaggccgaangauccau

SEQ ID NO: 15932 - RNA, 38 nt, Artificial Sequence
  Description of Artificial Sequence:  Enzymatic Nucleic Acid
  misc_feature (31)..(31): n stands for inosine
ccaaugggcugaugaggccguuaggccgaanuucaucu

SEQ ID NO: 15933 - RNA, 38 nt, Artificial Sequence
  Description of Artificial Sequence:  Enzymatic Nucleic Acid
  misc_feature (31)..(31): n stands for inosine
auccaaugcugaugaggccguuaggccgaanaguucau

SEQ ID NO: 15934 - RNA, 38 nt, Artificial Sequence
  Description of Artificial Sequence:  Enzymatic Nucleic Acid
  misc_feature (31)..(31): n stands for inosine
cauccaaucugaugaggccguuaggccgaangaguuca

SEQ ID NO: 15935 - RNA, 38 nt, Artificial Sequence
  Description of Artificial Sequence:  Enzymatic Nucleic Acid
  misc_feature (31)..(31): n stands for inosine
ucauccaacugaugaggccguuaggccgaanggaguuc

SEQ ID NO: 15936 - RNA, 38 nt, Artificial Sequence
  Description of Artificial Sequence:  Enzymatic Nucleic Acid
  misc_feature (31)..(31): n stands for inosine
guucacaacugaugaggccguuaggccgaanuucaucc

SEQ ID NO: 15937 - RNA, 38 nt, Artificial Sequence
  Description of Artificial Sequence:  Enzymatic Nucleic Acid
  misc_feature (31)..(31): n stands for inosine
cauaaggccugaugaggccguuaggccgaanucguuca

SEQ ID NO: 15938 - RNA, 38 nt, Artificial Sequence
  Description of Artificial Sequence:  Enzymatic Nucleic Acid
  misc_feature (31)..(31): n stands for inosine
caucauaacugaugaggccguuaggccgaancagucgu

SEQ ID NO: 15939 - RNA, 38 nt, Artificial Sequence
  Description of Artificial Sequence:  Enzymatic Nucleic Acid
  misc_feature (31)..(31): n stands for inosine
gcaucauacugaugaggccguuaggccgaangcagucg

SEQ ID NO: 15940 - RNA, 38 nt, Artificial Sequence
  Description of Artificial Sequence:  Enzymatic Nucleic Acid
  misc_feature (31)..(31): n stands for inosine
cauuugcucugaugaggccguuaggccgaancaucaua

SEQ ID NO: 15941 - RNA, 38 nt, Artificial Sequence
  Description of Artificial Sequence:  Enzymatic Nucleic Acid
  misc_feature (31)..(31): n stands for inosine
ccauuugccugaugaggccguuaggccgaangcaucau

SEQ ID NO: 15942 - RNA, 38 nt, Artificial Sequence
  Description of Artificial Sequence:  Enzymatic Nucleic Acid
  misc_feature (31)..(31): n stands for inosine
uucccauucugaugaggccguuaggccgaancuggcau

SEQ ID NO: 15943 - RNA, 38 nt, Artificial Sequence
  Description of Artificial Sequence:  Enzymatic Nucleic Acid
  misc_feature (31)..(31): n stands for inosine
gucucuggcugaugaggccguuaggccgaanaauuccc

SEQ ID NO: 15944 - RNA, 38 nt, Artificial Sequence
  Description of Artificial Sequence:  Enzymatic Nucleic Acid
  misc_feature (31)..(31): n stands for inosine
ggucucugcugaugaggccguuaggccgaangaauucc

SEQ ID NO: 15945 - RNA, 38 nt, Artificial Sequence
  Description of Artificial Sequence:  Enzymatic Nucleic Acid
  misc_feature (31)..(31): n stands for inosine
cggucucucugaugaggccguuaggccgaanggaauuc

SEQ ID NO: 15946 - RNA, 38 nt, Artificial Sequence
  Description of Artificial Sequence:  Enzymatic Nucleic Acid
  misc_feature (31)..(31): n stands for inosine
ccggucuccugaugaggccguuaggccgaangggaauu

SEQ ID NO: 15947 - RNA, 38 nt, Artificial Sequence
  Description of Artificial Sequence:  Enzymatic Nucleic Acid
  misc_feature (31)..(31): n stands for inosine
guucagcccugaugaggccguuaggccgaanucucugg

SEQ ID NO: 15948 - RNA, 38 nt, Artificial Sequence
  Description of Artificial Sequence:  Enzymatic Nucleic Acid
  misc_feature (31)..(31): n stands for inosine
cuagguuccugaugaggccguuaggccgaanccggucu

SEQ ID NO: 15949 - RNA, 38 nt, Artificial Sequence
  Description of Artificial Sequence:  Enzymatic Nucleic Acid
  misc_feature (31)..(31): n stands for inosine
cuuaccuacugaugaggccguuaggccgaanuucagcc

SEQ ID NO: 15950 - RNA, 38 nt, Artificial Sequence
  Description of Artificial Sequence:  Enzymatic Nucleic Acid
  misc_feature (31)..(31): n stands for inosine
gcuuaccucugaugaggccguuaggccgaanguucagc

SEQ ID NO: 15951 - RNA, 38 nt, Artificial Sequence
  Description of Artificial Sequence:  Enzymatic Nucleic Acid
  misc_feature (31)..(31): n stands for inosine
ggccaagacugaugaggccguuaggccgaancuuaccu

SEQ ID NO: 15952 - RNA, 38 nt, Artificial Sequence
  Description of Artificial Sequence:  Enzymatic Nucleic Acid
  misc_feature (31)..(31): n stands for inosine
cggccaagcugaugaggccguuaggccgaangcuuacc

SEQ ID NO: 15953 - RNA, 38 nt, Artificial Sequence
  Description of Artificial Sequence:  Enzymatic Nucleic Acid
  misc_feature (31)..(31): n stands for inosine
cacggccacugaugaggccguuaggccgaanaggcuua

SEQ ID NO: 15954 - RNA, 38 nt, Artificial Sequence
  Description of Artificial Sequence:  Enzymatic Nucleic Acid
  misc_feature (31)..(31): n stands for inosine
ggcaccaccugaugaggccguuaggccgaanccaagag

SEQ ID NO: 15955 - RNA, 38 nt, Artificial Sequence
  Description of Artificial Sequence:  Enzymatic Nucleic Acid
  misc_feature (31)..(31): n stands for inosine
uggccaaacugaugaggccguuaggccgaancaccacg

SEQ ID NO: 15956 - RNA, 38 nt, Artificial Sequence
  Description of Artificial Sequence:  Enzymatic Nucleic Acid
  misc_feature (31)..(31): n stands for inosine
uuggccaacugaugaggccguuaggccgaangcaccac

SEQ ID NO: 15957 - RNA, 38 nt, Artificial Sequence
  Description of Artificial Sequence:  Enzymatic Nucleic Acid
  misc_feature (31)..(31): n stands for inosine
aaucucuucugaugaggccguuaggccgaanccaaagg

SEQ ID NO: 15958 - RNA, 38 nt, Artificial Sequence
  Description of Artificial Sequence:  Enzymatic Nucleic Acid
  misc_feature (31)..(31): n stands for inosine
caaucucucugaugaggccguuaggccgaangccaaag

SEQ ID NO: 15959 - RNA, 38 nt, Artificial Sequence
  Description of Artificial Sequence:  Enzymatic Nucleic Acid
  misc_feature (31)..(31): n stands for inosine
aaggcauccugaugaggccguuaggccgaancuucaau

SEQ ID NO: 15960 - RNA, 38 nt, Artificial Sequence
  Description of Artificial Sequence:  Enzymatic Nucleic Acid
  misc_feature (31)..(31): n stands for inosine
auuccaaacugaugaggccguuaggccgaancaucugc

SEQ ID NO: 15961 - RNA, 38 nt, Artificial Sequence
  Description of Artificial Sequence:  Enzymatic Nucleic Acid
  misc_feature (31)..(31): n stands for inosine
aauuccaacugaugaggccguuaggccgaangcaucug

SEQ ID NO: 15962 - RNA, 38 nt, Artificial Sequence
  Description of Artificial Sequence:  Enzymatic Nucleic Acid
  misc_feature (31)..(31): n stands for inosine
ugcugucucugaugaggccguuaggccgaanucaauuc

SEQ ID NO: 15963 - RNA, 38 nt, Artificial Sequence
  Description of Artificial Sequence:  Enzymatic Nucleic Acid
  misc_feature (31)..(31): n stands for inosine
caaguugccugaugaggccguuaggccgaanucuuguc

SEQ ID NO: 15964 - RNA, 38 nt, Artificial Sequence
  Description of Artificial Sequence:  Enzymatic Nucleic Acid
  misc_feature (31)..(31): n stands for inosine
cugcaagucugaugaggccguuaggccgaancugucuu

SEQ ID NO: 15965 - RNA, 38 nt, Artificial Sequence
  Description of Artificial Sequence:  Enzymatic Nucleic Acid
  misc_feature (31)..(31): n stands for inosine
guccugcacugaugaggccguuaggccgaanuugcugu

SEQ ID NO: 15966 - RNA, 38 nt, Artificial Sequence
  Description of Artificial Sequence:  Enzymatic Nucleic Acid
  misc_feature (31)..(31): n stands for inosine
uacugucccugaugaggccguuaggccgaancaaguug

SEQ ID NO: 15967 - RNA, 38 nt, Artificial Sequence
  Description of Artificial Sequence:  Enzymatic Nucleic Acid
  misc_feature (31)..(31): n stands for inosine
acugcuaccugaugaggccguuaggccgaanuccugca

SEQ ID NO: 15968 - RNA, 38 nt, Artificial Sequence
  Description of Artificial Sequence:  Enzymatic Nucleic Acid
  misc_feature (31)..(31): n stands for inosine
auuuugaccugaugaggccguuaggccgaancuacugu

SEQ ID NO: 15969 - RNA, 38 nt, Artificial Sequence
  Description of Artificial Sequence:  Enzymatic Nucleic Acid
  misc_feature (31)..(31): n stands for inosine
caacauuucugaugaggccguuaggccgaanacugcua

SEQ ID NO: 15970 - RNA, 38 nt, Artificial Sequence
  Description of Artificial Sequence:  Enzymatic Nucleic Acid
  misc_feature (31)..(31): n stands for inosine
cugugugucugaugaggccguuaggccgaancuccuuc

SEQ ID NO: 15971 - RNA, 38 nt, Artificial Sequence
  Description of Artificial Sequence:  Enzymatic Nucleic Acid
  misc_feature (31)..(31): n stands for inosine
ucacugugcugaugaggccguuaggccgaanuugcucc

SEQ ID NO: 15972 - RNA, 38 nt, Artificial Sequence
  Description of Artificial Sequence:  Enzymatic Nucleic Acid
  misc_feature (31)..(31): n stands for inosine
gcucacugcugaugaggccguuaggccgaanuguugcu

SEQ ID NO: 15973 - RNA, 38 nt, Artificial Sequence
  Description of Artificial Sequence:  Enzymatic Nucleic Acid
  misc_feature (31)..(31): n stands for inosine
augcucaccugaugaggccguuaggccgaanuguguug

SEQ ID NO: 15974 - RNA, 38 nt, Artificial Sequence
  Description of Artificial Sequence:  Enzymatic Nucleic Acid
  misc_feature (31)..(31): n stands for inosine
gagcucgacugaugaggccguuaggccgaancucacug

SEQ ID NO: 15975 - RNA, 38 nt, Artificial Sequence
  Description of Artificial Sequence:  Enzymatic Nucleic Acid
  misc_feature (31)..(31): n stands for inosine
gacaugagcugaugaggccguuaggccgaancucgaug

SEQ ID NO: 15976 - RNA, 38 nt, Artificial Sequence
  Description of Artificial Sequence:  Enzymatic Nucleic Acid
  misc_feature (31)..(31): n stands for inosine
cagacaugcugaugaggccguuaggccgaanagcucga

SEQ ID NO: 15977 - RNA, 38 nt, Artificial Sequence
  Description of Artificial Sequence:  Enzymatic Nucleic Acid
  misc_feature (31)..(31): n stands for inosine
uucagacacugaugaggccguuaggccgaanagagcuc

SEQ ID NO: 15978 - RNA, 38 nt, Artificial Sequence
  Description of Artificial Sequence:  Enzymatic Nucleic Acid
  misc_feature (31)..(31): n stands for inosine
uugaguuccugaugaggccguuaggccgaanacaugag

SEQ ID NO: 15979 - RNA, 38 nt, Artificial Sequence
  Description of Artificial Sequence:  Enzymatic Nucleic Acid
  misc_feature (31)..(31): n stands for inosine
ggaucuugcugaugaggccguuaggccgaanuucagac

SEQ ID NO: 15980 - RNA, 38 nt, Artificial Sequence
  Description of Artificial Sequence:  Enzymatic Nucleic Acid
  misc_feature (31)..(31): n stands for inosine
gaggaucucugaugaggccguuaggccgaanaguucag

SEQ ID NO: 15981 - RNA, 38 nt, Artificial Sequence
  Description of Artificial Sequence:  Enzymatic Nucleic Acid
  misc_feature (31)..(31): n stands for inosine
augaaugacugaugaggccguuaggccgaanaucuuga

SEQ ID NO: 15982 - RNA, 38 nt, Artificial Sequence
  Description of Artificial Sequence:  Enzymatic Nucleic Acid
  misc_feature (31)..(31): n stands for inosine
uaugaaugcugaugaggccguuaggccgaangaucuug

SEQ ID NO: 15983 - RNA, 38 nt, Artificial Sequence
  Description of Artificial Sequence:  Enzymatic Nucleic Acid
  misc_feature (31)..(31): n stands for inosine
aauaugaacugaugaggccguuaggccgaanaggaucu

SEQ ID NO: 15984 - RNA, 38 nt, Artificial Sequence
  Description of Artificial Sequence:  Enzymatic Nucleic Acid
  misc_feature (31)..(31): n stands for inosine
gaccaauacugaugaggccguuaggccgaanaaugagg

SEQ ID NO: 15985 - RNA, 38 nt, Artificial Sequence
  Description of Artificial Sequence:  Enzymatic Nucleic Acid
  misc_feature (31)..(31): n stands for inosine
ugagauggcugaugaggccguuaggccgaanaccaaua

SEQ ID NO: 15986 - RNA, 38 nt, Artificial Sequence
  Description of Artificial Sequence:  Enzymatic Nucleic Acid
  misc_feature (31)..(31): n stands for inosine
auugagaucugaugaggccguuaggccgaanugaccaa

SEQ ID NO: 15987 - RNA, 38 nt, Artificial Sequence
  Description of Artificial Sequence:  Enzymatic Nucleic Acid
  misc_feature (31)..(31): n stands for inosine
cauugagacugaugaggccguuaggccgaangugacca

SEQ ID NO: 15988 - RNA, 38 nt, Artificial Sequence
  Description of Artificial Sequence:  Enzymatic Nucleic Acid
  misc_feature (31)..(31): n stands for inosine
ccacauugcugaugaggccguuaggccgaanaugguga

SEQ ID NO: 15989 - RNA, 38 nt, Artificial Sequence
  Description of Artificial Sequence:  Enzymatic Nucleic Acid
  misc_feature (31)..(31): n stands for inosine
gaccacaucugaugaggccguuaggccgaanagauggu

SEQ ID NO: 15990 - RNA, 38 nt, Artificial Sequence
  Description of Artificial Sequence:  Enzymatic Nucleic Acid
  misc_feature (31)..(31): n stands for inosine
uagaaggucugaugaggccguuaggccgaanaccacau

SEQ ID NO: 15991 - RNA, 38 nt, Artificial Sequence
  Description of Artificial Sequence:  Enzymatic Nucleic Acid
  misc_feature (31)..(31): n stands for inosine
accuagaacugaugaggccguuaggccgaanuugacca

SEQ ID NO: 15992 - RNA, 38 nt, Artificial Sequence
  Description of Artificial Sequence:  Enzymatic Nucleic Acid
  misc_feature (31)..(31): n stands for inosine
caccuagacugaugaggccguuaggccgaanguugacc

SEQ ID NO: 15993 - RNA, 38 nt, Artificial Sequence
  Description of Artificial Sequence:  Enzymatic Nucleic Acid
  misc_feature (31)..(31): n stands for inosine
aggcaccucugaugaggccguuaggccgaanaagguug

SEQ ID NO: 15994 - RNA, 38 nt, Artificial Sequence
  Description of Artificial Sequence:  Enzymatic Nucleic Acid
  misc_feature (31)..(31): n stands for inosine
uugguacacugaugaggccguuaggccgaancaccuag

SEQ ID NO: 15995 - RNA, 38 nt, Artificial Sequence
  Description of Artificial Sequence:  Enzymatic Nucleic Acid
  misc_feature (31)..(31): n stands for inosine
cuugguaccugaugaggccguuaggccgaangcaccua

SEQ ID NO: 15996 - RNA, 38 nt, Artificial Sequence
  Description of Artificial Sequence:  Enzymatic Nucleic Acid
  misc_feature (31)..(31): n stands for inosine
ccuggcuucugaugaggccguuaggccgaanuacaggc

SEQ ID NO: 15997 - RNA, 38 nt, Artificial Sequence
  Description of Artificial Sequence:  Enzymatic Nucleic Acid
  misc_feature (31)..(31): n stands for inosine
uccuggcucugaugaggccguuaggccgaanguacagg

SEQ ID NO: 15998 - RNA, 38 nt, Artificial Sequence
  Description of Artificial Sequence:  Enzymatic Nucleic Acid
  misc_feature (31)..(31): n stands for inosine
gcccuccucugaugaggccguuaggccgaancuuggua

SEQ ID NO: 15999 - RNA, 38 nt, Artificial Sequence
  Description of Artificial Sequence:  Enzymatic Nucleic Acid
  misc_feature (31)..(31): n stands for inosine
ggcccucccugaugaggccguuaggccgaangcuuggu

SEQ ID NO: 16000 - RNA, 38 nt, Artificial Sequence
  Description of Artificial Sequence:  Enzymatic Nucleic Acid
  misc_feature (31)..(31): n stands for inosine
ccaugagucugaugaggccguuaggccgaancccuccu

SEQ ID NO: 16001 - RNA, 38 nt, Artificial Sequence
  Description of Artificial Sequence:  Enzymatic Nucleic Acid
  misc_feature (31)..(31): n stands for inosine
accaugagcugaugaggccguuaggccgaangcccucc

SEQ ID NO: 16002 - RNA, 38 nt, Artificial Sequence
  Description of Artificial Sequence:  Enzymatic Nucleic Acid
  misc_feature (31)..(31): n stands for inosine
ucaccaugcugaugaggccguuaggccgaanuggcccu

SEQ ID NO: 16003 - RNA, 38 nt, Artificial Sequence
  Description of Artificial Sequence:  Enzymatic Nucleic Acid
  misc_feature (31)..(31): n stands for inosine
aaucaccacugaugaggccguuaggccgaanaguggcc

SEQ ID NO: 16004 - RNA, 38 nt, Artificial Sequence
  Description of Artificial Sequence:  Enzymatic Nucleic Acid
  misc_feature (31)..(31): n stands for inosine
aaauuugccugaugaggccguuaggccgaanaauucca

SEQ ID NO: 16005 - RNA, 38 nt, Artificial Sequence
  Description of Artificial Sequence:  Enzymatic Nucleic Acid
  misc_feature (31)..(31): n stands for inosine
uccaaauucugaugaggccguuaggccgaancagaauu

SEQ ID NO: 16006 - RNA, 38 nt, Artificial Sequence
  Description of Artificial Sequence:  Enzymatic Nucleic Acid
  misc_feature (31)..(31): n stands for inosine
aguggacacugaugaggccguuaggccgaanuuuccaa

SEQ ID NO: 16007 - RNA, 38 nt, Artificial Sequence
  Description of Artificial Sequence:  Enzymatic Nucleic Acid
  misc_feature (31)..(31): n stands for inosine
aaguggaccugaugaggccguuaggccgaanguuucca

SEQ ID NO: 16008 - RNA, 38 nt, Artificial Sequence
  Description of Artificial Sequence:  Enzymatic Nucleic Acid
  misc_feature (31)..(31): n stands for inosine
agguaagucugaugaggccguuaggccgaanacagguu

SEQ ID NO: 16009 - RNA, 38 nt, Artificial Sequence
  Description of Artificial Sequence:  Enzymatic Nucleic Acid
  misc_feature (31)..(31): n stands for inosine
cagguaagcugaugaggccguuaggccgaangacaggu

SEQ ID NO: 16010 - RNA, 38 nt, Artificial Sequence
  Description of Artificial Sequence:  Enzymatic Nucleic Acid
  misc_feature (31)..(31): n stands for inosine
cucagguacugaugaggccguuaggccgaanuggacag

SEQ ID NO: 16011 - RNA, 38 nt, Artificial Sequence
  Description of Artificial Sequence:  Enzymatic Nucleic Acid
  misc_feature (31)..(31): n stands for inosine
gcuccucacugaugaggccguuaggccgaanuaagugg

SEQ ID NO: 16012 - RNA, 38 nt, Artificial Sequence
  Description of Artificial Sequence:  Enzymatic Nucleic Acid
  misc_feature (31)..(31): n stands for inosine
ugcuccuccugaugaggccguuaggccgaanguaagug

SEQ ID NO: 16013 - RNA, 38 nt, Artificial Sequence
  Description of Artificial Sequence:  Enzymatic Nucleic Acid
  misc_feature (31)..(31): n stands for inosine
auuucucucugaugaggccguuaggccgaancuccuca

SEQ ID NO: 16014 - RNA, 38 nt, Artificial Sequence
  Description of Artificial Sequence:  Enzymatic Nucleic Acid
  misc_feature (31)..(31): n stands for inosine
cuuguaggcugaugaggccguuaggccgaanacaaauu

SEQ ID NO: 16015 - RNA, 38 nt, Artificial Sequence
  Description of Artificial Sequence:  Enzymatic Nucleic Acid
  misc_feature (31)..(31): n stands for inosine
ucuuguagcugaugaggccguuaggccgaangacaaau

SEQ ID NO: 16016 - RNA, 38 nt, Artificial Sequence
  Description of Artificial Sequence:  Enzymatic Nucleic Acid
  misc_feature (31)..(31): n stands for inosine
gucuuguacugaugaggccguuaggccgaanggacaaa

SEQ ID NO: 16017 - RNA, 38 nt, Artificial Sequence
  Description of Artificial Sequence:  Enzymatic Nucleic Acid
  misc_feature (31)..(31): n stands for inosine
ggucuugucugaugaggccguuaggccgaangggacaa

SEQ ID NO: 16018 - RNA, 38 nt, Artificial Sequence
  Description of Artificial Sequence:  Enzymatic Nucleic Acid
  misc_feature (31)..(31): n stands for inosine
uuuggucucugaugaggccguuaggccgaanuagggga

SEQ ID NO: 16019 - RNA, 38 nt, Artificial Sequence
  Description of Artificial Sequence:  Enzymatic Nucleic Acid
  misc_feature (31)..(31): n stands for inosine
gccccuuucugaugaggccguuaggccgaanucuugua

SEQ ID NO: 16020 - RNA, 38 nt, Artificial Sequence
  Description of Artificial Sequence:  Enzymatic Nucleic Acid
  misc_feature (31)..(31): n stands for inosine
ugccccuucugaugaggccguuaggccgaangucuugu

SEQ ID NO: 16021 - RNA, 38 nt, Artificial Sequence
  Description of Artificial Sequence:  Enzymatic Nucleic Acid
  misc_feature (31)..(31): n stands for inosine
cggaaucgcugaugaggccguuaggccgaanccccuuu

SEQ ID NO: 16022 - RNA, 38 nt, Artificial Sequence
  Description of Artificial Sequence:  Enzymatic Nucleic Acid
  misc_feature (31)..(31): n stands for inosine
cccuugaccugaugaggccguuaggccgaanaaucgug

SEQ ID NO: 16023 - RNA, 38 nt, Artificial Sequence
  Description of Artificial Sequence:  Enzymatic Nucleic Acid
  misc_feature (31)..(31): n stands for inosine
cuuucccucugaugaggccguuaggccgaanacggaau

SEQ ID NO: 16024 - RNA, 38 nt, Artificial Sequence
  Description of Artificial Sequence:  Enzymatic Nucleic Acid
  misc_feature (31)..(31): n stands for inosine
uccaacgucugaugaggccguuaggccgaanucuuucc

SEQ ID NO: 16025 - RNA, 38 nt, Artificial Sequence
  Description of Artificial Sequence:  Enzymatic Nucleic Acid
  misc_feature (31)..(31): n stands for inosine
acagggaucugaugaggccguuaggccgaancuccaac

SEQ ID NO: 16026 - RNA, 38 nt, Artificial Sequence
  Description of Artificial Sequence:  Enzymatic Nucleic Acid
  misc_feature (31)..(31): n stands for inosine
auccacagcugaugaggccguuaggccgaanauugcuc

SEQ ID NO: 16027 - RNA, 38 nt, Artificial Sequence
  Description of Artificial Sequence:  Enzymatic Nucleic Acid
  misc_feature (31)..(31): n stands for inosine
gauccacacugaugaggccguuaggccgaangauugcu

SEQ ID NO: 16028 - RNA, 38 nt, Artificial Sequence
  Description of Artificial Sequence:  Enzymatic Nucleic Acid
  misc_feature (31)..(31): n stands for inosine
agauccaccugaugaggccguuaggccgaanggauugc

SEQ ID NO: 16029 - RNA, 38 nt, Artificial Sequence
  Description of Artificial Sequence:  Enzymatic Nucleic Acid
  misc_feature (31)..(31): n stands for inosine
gccguuuccugaugaggccguuaggccgaanauccaca

SEQ ID NO: 16030 - RNA, 38 nt, Artificial Sequence
  Description of Artificial Sequence:  Enzymatic Nucleic Acid
  misc_feature (31)..(31): n stands for inosine
gcuguccacugaugaggccguuaggccgaancgccguu

SEQ ID NO: 16031 - RNA, 38 nt, Artificial Sequence
  Description of Artificial Sequence:  Enzymatic Nucleic Acid
  misc_feature (31)..(31): n stands for inosine
ggugaugccugaugaggccguuaggccgaanuccaagc

SEQ ID NO: 16032 - RNA, 38 nt, Artificial Sequence
  Description of Artificial Sequence:  Enzymatic Nucleic Acid
  misc_feature (31)..(31): n stands for inosine
acuggugacugaugaggccguuaggccgaancugucca

SEQ ID NO: 16033 - RNA, 38 nt, Artificial Sequence
  Description of Artificial Sequence:  Enzymatic Nucleic Acid
  misc_feature (31)..(31): n stands for inosine
gcuacuggcugaugaggccguuaggccgaanaugcugu

SEQ ID NO: 16034 - RNA, 38 nt, Artificial Sequence
  Description of Artificial Sequence:  Enzymatic Nucleic Acid
  misc_feature (31)..(31): n stands for inosine
uggcuacucugaugaggccguuaggccgaanugaugcu

SEQ ID NO: 16035 - RNA, 38 nt, Artificial Sequence
  Description of Artificial Sequence:  Enzymatic Nucleic Acid
  misc_feature (31)..(31): n stands for inosine
cuggcuaccugaugaggccguuaggccgaangugaugc

SEQ ID NO: 16036 - RNA, 38 nt, Artificial Sequence
  Description of Artificial Sequence:  Enzymatic Nucleic Acid
  misc_feature (31)..(31): n stands for inosine
ugagcucucugaugaggccguuaggccgaancuacugg

SEQ ID NO: 16037 - RNA, 38 nt, Artificial Sequence
  Description of Artificial Sequence:  Enzymatic Nucleic Acid
  misc_feature (31)..(31): n stands for inosine
cugagcuccugaugaggccguuaggccgaangcuacug

SEQ ID NO: 16038 - RNA, 38 nt, Artificial Sequence
  Description of Artificial Sequence:  Enzymatic Nucleic Acid
  misc_feature (31)..(31): n stands for inosine
gcuggcugcugaugaggccguuaggccgaancucuggc

SEQ ID NO: 16039 - RNA, 38 nt, Artificial Sequence
  Description of Artificial Sequence:  Enzymatic Nucleic Acid
  misc_feature (31)..(31): n stands for inosine
gagcuggccugaugaggccguuaggccgaanagcucug

SEQ ID NO: 16040 - RNA, 38 nt, Artificial Sequence
  Description of Artificial Sequence:  Enzymatic Nucleic Acid
  misc_feature (31)..(31): n stands for inosine
ccagagcucugaugaggccguuaggccgaancugagcu

SEQ ID NO: 16041 - RNA, 38 nt, Artificial Sequence
  Description of Artificial Sequence:  Enzymatic Nucleic Acid
  misc_feature (31)..(31): n stands for inosine
uccagagccugaugaggccguuaggccgaangcugagc

SEQ ID NO: 16042 - RNA, 38 nt, Artificial Sequence
  Description of Artificial Sequence:  Enzymatic Nucleic Acid
  misc_feature (31)..(31): n stands for inosine
aaauccagcugaugaggccguuaggccgaancuggcug

SEQ ID NO: 16043 - RNA, 38 nt, Artificial Sequence
  Description of Artificial Sequence:  Enzymatic Nucleic Acid
  misc_feature (31)..(31): n stands for inosine
acaaaucccugaugaggccguuaggccgaanagcuggc

SEQ ID NO: 16044 - RNA, 38 nt, Artificial Sequence
  Description of Artificial Sequence:  Enzymatic Nucleic Acid
  misc_feature (31)..(31): n stands for inosine
ucacugagcugaugaggccguuaggccgaanacuucuc

SEQ ID NO: 16045 - RNA, 38 nt, Artificial Sequence
  Description of Artificial Sequence:  Enzymatic Nucleic Acid
  misc_feature (31)..(31): n stands for inosine
aucacugacugaugaggccguuaggccgaangacuucu

SEQ ID NO: 16046 - RNA, 38 nt, Artificial Sequence
  Description of Artificial Sequence:  Enzymatic Nucleic Acid
  misc_feature (31)..(31): n stands for inosine
caucacugcugaugaggccguuaggccgaanggacuuc

SEQ ID NO: 16047 - RNA, 38 nt, Artificial Sequence
  Description of Artificial Sequence:  Enzymatic Nucleic Acid
  misc_feature (31)..(31): n stands for inosine
uacaucaccugaugaggccguuaggccgaanagggacu

SEQ ID NO: 16048 - RNA, 38 nt, Artificial Sequence
  Description of Artificial Sequence:  Enzymatic Nucleic Acid
  misc_feature (31)..(31): n stands for inosine
ucuucaggcugaugaggccguuaggccgaancuuccuc

SEQ ID NO: 16049 - RNA, 38 nt, Artificial Sequence
  Description of Artificial Sequence:  Enzymatic Nucleic Acid
  misc_feature (31)..(31): n stands for inosine
gaucuucacugaugaggccguuaggccgaanagcuucc

SEQ ID NO: 16050 - RNA, 38 nt, Artificial Sequence
  Description of Artificial Sequence:  Enzymatic Nucleic Acid
  misc_feature (31)..(31): n stands for inosine
agaucuuccugaugaggccguuaggccgaangagcuuc

SEQ ID NO: 16051 - RNA, 38 nt, Artificial Sequence
  Description of Artificial Sequence:  Enzymatic Nucleic Acid
  misc_feature (31)..(31): n stands for inosine
ccuuauaccugaugaggccguuaggccgaanaucuuca

SEQ ID NO: 16052 - RNA, 38 nt, Artificial Sequence
  Description of Artificial Sequence:  Enzymatic Nucleic Acid
  misc_feature (31)..(31): n stands for inosine
ggucaggacugaugaggccguuaggccgaanuccuuau

SEQ ID NO: 16053 - RNA, 38 nt, Artificial Sequence
  Description of Artificial Sequence:  Enzymatic Nucleic Acid
  misc_feature (31)..(31): n stands for inosine
caaggucacugaugaggccguuaggccgaanaaguccu

SEQ ID NO: 16054 - RNA, 38 nt, Artificial Sequence
  Description of Artificial Sequence:  Enzymatic Nucleic Acid
  misc_feature (31)..(31): n stands for inosine
ccaagguccugaugaggccguuaggccgaangaagucc

SEQ ID NO: 16055 - RNA, 38 nt, Artificial Sequence
  Description of Artificial Sequence:  Enzymatic Nucleic Acid
  misc_feature (31)..(31): n stands for inosine
ugcuccaacugaugaggccguuaggccgaanucaggaa

SEQ ID NO: 16056 - RNA, 38 nt, Artificial Sequence
  Description of Artificial Sequence:  Enzymatic Nucleic Acid
  misc_feature (31)..(31): n stands for inosine
augcuccacugaugaggccguuaggccgaangucagga

SEQ ID NO: 16057 - RNA, 38 nt, Artificial Sequence
  Description of Artificial Sequence:  Enzymatic Nucleic Acid
  misc_feature (31)..(31): n stands for inosine
agaugagacugaugaggccguuaggccgaancuccaag

SEQ ID NO: 16058 - RNA, 38 nt, Artificial Sequence
  Description of Artificial Sequence:  Enzymatic Nucleic Acid
  misc_feature (31)..(31): n stands for inosine
aacagaugcugaugaggccguuaggccgaanaugcucc

SEQ ID NO: 16059 - RNA, 38 nt, Artificial Sequence
  Description of Artificial Sequence:  Enzymatic Nucleic Acid
  misc_feature (31)..(31): n stands for inosine
guaacagacugaugaggccguuaggccgaanagaugcu

SEQ ID NO: 16060 - RNA, 38 nt, Artificial Sequence
  Description of Artificial Sequence:  Enzymatic Nucleic Acid
  misc_feature (31)..(31): n stands for inosine
gcuguaaccugaugaggccguuaggccgaanaugagau

SEQ ID NO: 16061 - RNA, 38 nt, Artificial Sequence
  Description of Artificial Sequence:  Enzymatic Nucleic Acid
  misc_feature (31)..(31): n stands for inosine
uuggaagccugaugaggccguuaggccgaanuaacaga

SEQ ID NO: 16062 - RNA, 38 nt, Artificial Sequence
  Description of Artificial Sequence:  Enzymatic Nucleic Acid
  misc_feature (31)..(31): n stands for inosine
cacuuggacugaugaggccguuaggccgaancuguaac

SEQ ID NO: 16063 - RNA, 38 nt, Artificial Sequence
  Description of Artificial Sequence:  Enzymatic Nucleic Acid
  misc_feature (31)..(31): n stands for inosine
agccacuucugaugaggccguuaggccgaanaagcugu

SEQ ID NO: 16064 - RNA, 38 nt, Artificial Sequence
  Description of Artificial Sequence:  Enzymatic Nucleic Acid
  misc_feature (31)..(31): n stands for inosine
uagccacucugaugaggccguuaggccgaangaagcug

SEQ ID NO: 16065 - RNA, 38 nt, Artificial Sequence
  Description of Artificial Sequence:  Enzymatic Nucleic Acid
  misc_feature (31)..(31): n stands for inosine
augcccuucugaugaggccguuaggccgaanccacuug

SEQ ID NO: 16066 - RNA, 38 nt, Artificial Sequence
  Description of Artificial Sequence:  Enzymatic Nucleic Acid
  misc_feature (31)..(31): n stands for inosine
gaacuccacugaugaggccguuaggccgaancccuuag

SEQ ID NO: 16067 - RNA, 38 nt, Artificial Sequence
  Description of Artificial Sequence:  Enzymatic Nucleic Acid
  misc_feature (31)..(31): n stands for inosine
cgaugccacugaugaggccguuaggccgaanaacucca

SEQ ID NO: 16068 - RNA, 38 nt, Artificial Sequence
  Description of Artificial Sequence:  Enzymatic Nucleic Acid
  misc_feature (31)..(31): n stands for inosine
uuucgcgacugaugaggccguuaggccgaanccaagaa

SEQ ID NO: 16069 - RNA, 38 nt, Artificial Sequence
  Description of Artificial Sequence:  Enzymatic Nucleic Acid
  misc_feature (31)..(31): n stands for inosine
gucccugucugaugaggccguuaggccgaanauacacu

SEQ ID NO: 16070 - RNA, 38 nt, Artificial Sequence
  Description of Artificial Sequence:  Enzymatic Nucleic Acid
  misc_feature (31)..(31): n stands for inosine
ggucccugcugaugaggccguuaggccgaangauacac

SEQ ID NO: 16071 - RNA, 38 nt, Artificial Sequence
  Description of Artificial Sequence:  Enzymatic Nucleic Acid
  misc_feature (31)..(31): n stands for inosine
cagguccccugaugaggccguuaggccgaanuggauac

SEQ ID NO: 16072 - RNA, 38 nt, Artificial Sequence
  Description of Artificial Sequence:  Enzymatic Nucleic Acid
  misc_feature (31)..(31): n stands for inosine
ugccgccacugaugaggccguuaggccgaanucccugu

SEQ ID NO: 16073 - RNA, 38 nt, Artificial Sequence
  Description of Artificial Sequence:  Enzymatic Nucleic Acid
  misc_feature (31)..(31): n stands for inosine
gugccgcccugaugaggccguuaggccgaangucccug

SEQ ID NO: 16074 - RNA, 38 nt, Artificial Sequence
  Description of Artificial Sequence:  Enzymatic Nucleic Acid
  misc_feature (31)..(31): n stands for inosine
auauuucgcugaugaggccguuaggccgaanccgccag

SEQ ID NO: 16075 - RNA, 38 nt, Artificial Sequence
  Description of Artificial Sequence:  Enzymatic Nucleic Acid
  misc_feature (31)..(31): n stands for inosine
cgauaagacugaugaggccguuaggccgaanauauuuc

SEQ ID NO: 16076 - RNA, 38 nt, Artificial Sequence
  Description of Artificial Sequence:  Enzymatic Nucleic Acid
  misc_feature (31)..(31): n stands for inosine
ccgauaagcugaugaggccguuaggccgaangauauuu

SEQ ID NO: 16077 - RNA, 38 nt, Artificial Sequence
  Description of Artificial Sequence:  Enzymatic Nucleic Acid
  misc_feature (31)..(31): n stands for inosine
cuccgauacugaugaggccguuaggccgaanaggauau

SEQ ID NO: 16078 - RNA, 38 nt, Artificial Sequence
  Description of Artificial Sequence:  Enzymatic Nucleic Acid
  misc_feature (31)..(31): n stands for inosine
aaagucaccugaugaggccguuaggccgaanauuuuaa

SEQ ID NO: 16079 - RNA, 38 nt, Artificial Sequence
  Description of Artificial Sequence:  Enzymatic Nucleic Acid
  misc_feature (31)..(31): n stands for inosine
caagccaacugaugaggccguuaggccgaanucacaga

SEQ ID NO: 16080 - RNA, 38 nt, Artificial Sequence
  Description of Artificial Sequence:  Enzymatic Nucleic Acid
  misc_feature (31)..(31): n stands for inosine
ccgggccacugaugaggccguuaggccgaanccaaagu

SEQ ID NO: 16081 - RNA, 38 nt, Artificial Sequence
  Description of Artificial Sequence:  Enzymatic Nucleic Acid
  misc_feature (31)..(31): n stands for inosine
auaucccgcugaugaggccguuaggccgaanccaagcc

SEQ ID NO: 16082 - RNA, 38 nt, Artificial Sequence
  Description of Artificial Sequence:  Enzymatic Nucleic Acid
  misc_feature (31)..(31): n stands for inosine
aauauccccugaugaggccguuaggccgaangccaagc

SEQ ID NO: 16083 - RNA, 38 nt, Artificial Sequence
  Description of Artificial Sequence:  Enzymatic Nucleic Acid
  misc_feature (31)..(31): n stands for inosine
cauaaucucugaugaggccguuaggccgaanaucuuua

SEQ ID NO: 16084 - RNA, 38 nt, Artificial Sequence
  Description of Artificial Sequence:  Enzymatic Nucleic Acid
  misc_feature (31)..(31): n stands for inosine
acauaauccugaugaggccguuaggccgaangaucuuu

SEQ ID NO: 16085 - RNA, 38 nt, Artificial Sequence
  Description of Artificial Sequence:  Enzymatic Nucleic Acid
  misc_feature (31)..(31): n stands for inosine
uccuuuuccugaugaggccguuaggccgaanacauaau

SEQ ID NO: 16086 - RNA, 38 nt, Artificial Sequence
  Description of Artificial Sequence:  Enzymatic Nucleic Acid
  misc_feature (31)..(31): n stands for inosine
gggaggcgcugaugaggccguuaggccgaancaucucc

SEQ ID NO: 16087 - RNA, 38 nt, Artificial Sequence
  Description of Artificial Sequence:  Enzymatic Nucleic Acid
  misc_feature (31)..(31): n stands for inosine
caaagggacugaugaggccguuaggccgaancgagcau

SEQ ID NO: 16088 - RNA, 38 nt, Artificial Sequence
  Description of Artificial Sequence:  Enzymatic Nucleic Acid
  misc_feature (31)..(31): n stands for inosine
ucaaagggcugaugaggccguuaggccgaangcgagca

SEQ ID NO: 16089 - RNA, 38 nt, Artificial Sequence
  Description of Artificial Sequence:  Enzymatic Nucleic Acid
  misc_feature (31)..(31): n stands for inosine
uuucaaagcugaugaggccguuaggccgaanaggcgag

SEQ ID NO: 16090 - RNA, 38 nt, Artificial Sequence
  Description of Artificial Sequence:  Enzymatic Nucleic Acid
  misc_feature (31)..(31): n stands for inosine
auuucaaacugaugaggccguuaggccgaangaggcga

SEQ ID NO: 16091 - RNA, 38 nt, Artificial Sequence
  Description of Artificial Sequence:  Enzymatic Nucleic Acid
  misc_feature (31)..(31): n stands for inosine
cauuucaacugaugaggccguuaggccgaanggaggcg

SEQ ID NO: 16092 - RNA, 38 nt, Artificial Sequence
  Description of Artificial Sequence:  Enzymatic Nucleic Acid
  misc_feature (31)..(31): n stands for inosine
guuucuggcugaugaggccguuaggccgaanccaucca

SEQ ID NO: 16093 - RNA, 38 nt, Artificial Sequence
  Description of Artificial Sequence:  Enzymatic Nucleic Acid
  misc_feature (31)..(31): n stands for inosine
uguuucugcugaugaggccguuaggccgaangccaucc

SEQ ID NO: 16094 - RNA, 38 nt, Artificial Sequence
  Description of Artificial Sequence:  Enzymatic Nucleic Acid
  misc_feature (31)..(31): n stands for inosine
uuguuucucugaugaggccguuaggccgaanggccauc

SEQ ID NO: 16095 - RNA, 38 nt, Artificial Sequence
  Description of Artificial Sequence:  Enzymatic Nucleic Acid
  misc_feature (31)..(31): n stands for inosine
auuguuuccugaugaggccguuaggccgaangggccau

SEQ ID NO: 16096 - RNA, 38 nt, Artificial Sequence
  Description of Artificial Sequence:  Enzymatic Nucleic Acid
  misc_feature (31)..(31): n stands for inosine
ucaaaaaucugaugaggccguuaggccgaanuuucugg

SEQ ID NO: 16097 - RNA, 38 nt, Artificial Sequence
  Description of Artificial Sequence:  Enzymatic Nucleic Acid
  misc_feature (31)..(31): n stands for inosine
guacacuccugaugaggccguuaggccgaanucaaaaa

SEQ ID NO: 16098 - RNA, 38 nt, Artificial Sequence
  Description of Artificial Sequence:  Enzymatic Nucleic Acid
  misc_feature (31)..(31): n stands for inosine
cuggauugcugaugaggccguuaggccgaanuacacuc

SEQ ID NO: 16099 - RNA, 38 nt, Artificial Sequence
  Description of Artificial Sequence:  Enzymatic Nucleic Acid
  misc_feature (31)..(31): n stands for inosine
cucuggaucugaugaggccguuaggccgaanuguacac

SEQ ID NO: 16100 - RNA, 38 nt, Artificial Sequence
  Description of Artificial Sequence:  Enzymatic Nucleic Acid
  misc_feature (31)..(31): n stands for inosine
gucacucucugaugaggccguuaggccgaanauugugu

SEQ ID NO: 16101 - RNA, 38 nt, Artificial Sequence
  Description of Artificial Sequence:  Enzymatic Nucleic Acid
  misc_feature (31)..(31): n stands for inosine
cgucacuccugaugaggccguuaggccgaangauugug

SEQ ID NO: 16102 - RNA, 38 nt, Artificial Sequence
  Description of Artificial Sequence:  Enzymatic Nucleic Acid
  misc_feature (31)..(31): n stands for inosine
aaaagacccugaugaggccguuaggccgaanacgucac

SEQ ID NO: 16103 - RNA, 38 nt, Artificial Sequence
  Description of Artificial Sequence:  Enzymatic Nucleic Acid
  misc_feature (31)..(31): n stands for inosine
acaccaaacugaugaggccguuaggccgaanaccagac

SEQ ID NO: 16104 - RNA, 38 nt, Artificial Sequence
  Description of Artificial Sequence:  Enzymatic Nucleic Acid
  misc_feature (31)..(31): n stands for inosine
uuucccaccugaugaggccguuaggccgaancaaaaca

SEQ ID NO: 16105 - RNA, 38 nt, Artificial Sequence
  Description of Artificial Sequence:  Enzymatic Nucleic Acid
  misc_feature (31)..(31): n stands for inosine
gcaccuaacugaugaggccguuaggccgaanaaaauau

SEQ ID NO: 16106 - RNA, 38 nt, Artificial Sequence
  Description of Artificial Sequence:  Enzymatic Nucleic Acid
  misc_feature (31)..(31): n stands for inosine
agcaccuacugaugaggccguuaggccgaangaaaaua

SEQ ID NO: 16107 - RNA, 38 nt, Artificial Sequence
  Description of Artificial Sequence:  Enzymatic Nucleic Acid
  misc_feature (31)..(31): n stands for inosine
uauggagacugaugaggccguuaggccgaancaccuaa

SEQ ID NO: 16108 - RNA, 38 nt, Artificial Sequence
  Description of Artificial Sequence:  Enzymatic Nucleic Acid
  misc_feature (31)..(31): n stands for inosine
ggauauggcugaugaggccguuaggccgaanaagcacc

SEQ ID NO: 16109 - RNA, 38 nt, Artificial Sequence
  Description of Artificial Sequence:  Enzymatic Nucleic Acid
  misc_feature (31)..(31): n stands for inosine
caggauaucugaugaggccguuaggccgaanagaagca

SEQ ID NO: 16110 - RNA, 38 nt, Artificial Sequence
  Description of Artificial Sequence:  Enzymatic Nucleic Acid
  misc_feature (31)..(31): n stands for inosine
ccaggauacugaugaggccguuaggccgaangagaagc

SEQ ID NO: 16111 - RNA, 38 nt, Artificial Sequence
  Description of Artificial Sequence:  Enzymatic Nucleic Acid
  misc_feature (31)..(31): n stands for inosine
uuaccccacugaugaggccguuaggccgaanauaugga

SEQ ID NO: 16112 - RNA, 38 nt, Artificial Sequence
  Description of Artificial Sequence:  Enzymatic Nucleic Acid
  misc_feature (31)..(31): n stands for inosine
uuuacccccugaugaggccguuaggccgaangauaugg

SEQ ID NO: 16113 - RNA, 38 nt, Artificial Sequence
  Description of Artificial Sequence:  Enzymatic Nucleic Acid
  misc_feature (31)..(31): n stands for inosine
cucauucucugaugaggccguuaggccgaanuuccuuc

SEQ ID NO: 16114 - RNA, 38 nt, Artificial Sequence
  Description of Artificial Sequence:  Enzymatic Nucleic Acid
  misc_feature (31)..(31): n stands for inosine
uaaucaggcugaugaggccguuaggccgaancccucau

SEQ ID NO: 16115 - RNA, 38 nt, Artificial Sequence
  Description of Artificial Sequence:  Enzymatic Nucleic Acid
  misc_feature (31)..(31): n stands for inosine
auaaucagcugaugaggccguuaggccgaangcccuca

SEQ ID NO: 16116 - RNA, 38 nt, Artificial Sequence
  Description of Artificial Sequence:  Enzymatic Nucleic Acid
  misc_feature (31)..(31): n stands for inosine
uauaaucacugaugaggccguuaggccgaanggcccuc

SEQ ID NO: 16117 - RNA, 38 nt, Artificial Sequence
  Description of Artificial Sequence:  Enzymatic Nucleic Acid
  misc_feature (31)..(31): n stands for inosine
guauaauccugaugaggccguuaggccgaangggcccu

SEQ ID NO: 16118 - RNA, 38 nt, Artificial Sequence
  Description of Artificial Sequence:  Enzymatic Nucleic Acid
  misc_feature (31)..(31): n stands for inosine
ucuggugucugaugaggccguuaggccgaanuauaauc

SEQ ID NO: 16119 - RNA, 38 nt, Artificial Sequence
  Description of Artificial Sequence:  Enzymatic Nucleic Acid
  misc_feature (31)..(31): n stands for inosine
auuucuggcugaugaggccguuaggccgaanuaguaua

SEQ ID NO: 16120 - RNA, 38 nt, Artificial Sequence
  Description of Artificial Sequence:  Enzymatic Nucleic Acid
  misc_feature (31)..(31): n stands for inosine
acauuucucugaugaggccguuaggccgaanuguagua

SEQ ID NO: 16121 - RNA, 38 nt, Artificial Sequence
  Description of Artificial Sequence:  Enzymatic Nucleic Acid
  misc_feature (31)..(31): n stands for inosine
uacauuuccugaugaggccguuaggccgaanguguagu

SEQ ID NO: 16122 - RNA, 38 nt, Artificial Sequence
  Description of Artificial Sequence:  Enzymatic Nucleic Acid
  misc_feature (31)..(31): n stands for inosine
cauggucucugaugaggccguuaggccgaanuacauuu

SEQ ID NO: 16123 - RNA, 38 nt, Artificial Sequence
  Description of Artificial Sequence:  Enzymatic Nucleic Acid
  misc_feature (31)..(31): n stands for inosine
gcaugguccugaugaggccguuaggccgaanguacauu

SEQ ID NO: 16124 - RNA, 38 nt, Artificial Sequence
  Description of Artificial Sequence:  Enzymatic Nucleic Acid
  misc_feature (31)..(31): n stands for inosine
uccagcaucugaugaggccguuaggccgaanucuggua

SEQ ID NO: 16125 - RNA, 38 nt, Artificial Sequence
  Description of Artificial Sequence:  Enzymatic Nucleic Acid
  misc_feature (31)..(31): n stands for inosine
guccagcacugaugaggccguuaggccgaangucuggu

SEQ ID NO: 16126 - RNA, 38 nt, Artificial Sequence
  Description of Artificial Sequence:  Enzymatic Nucleic Acid
  misc_feature (31)..(31): n stands for inosine
agcagucccugaugaggccguuaggccgaancaugguc

SEQ ID NO: 16127 - RNA, 38 nt, Artificial Sequence
  Description of Artificial Sequence:  Enzymatic Nucleic Acid
  misc_feature (31)..(31): n stands for inosine
cccgugcccugaugaggccguuaggccgaancagucca

SEQ ID NO: 16128 - RNA, 38 nt, Artificial Sequence
  Description of Artificial Sequence:  Enzymatic Nucleic Acid
  misc_feature (31)..(31): n stands for inosine
gcuccccgcugaugaggccguuaggccgaanccagcag

SEQ ID NO: 16129 - RNA, 38 nt, Artificial Sequence
  Description of Artificial Sequence:  Enzymatic Nucleic Acid
  misc_feature (31)..(31): n stands for inosine
ucugacugcugaugaggccguuaggccgaancuccccg

SEQ ID NO: 16130 - RNA, 38 nt, Artificial Sequence
  Description of Artificial Sequence:  Enzymatic Nucleic Acid
  misc_feature (31)..(31): n stands for inosine
cucugacucugaugaggccguuaggccgaangcucccc

SEQ ID NO: 16131 - RNA, 38 nt, Artificial Sequence
  Description of Artificial Sequence:  Enzymatic Nucleic Acid
  misc_feature (31)..(31): n stands for inosine
ucucugaccugaugaggccguuaggccgaanggcuccc

SEQ ID NO: 16132 - RNA, 38 nt, Artificial Sequence
  Description of Artificial Sequence:  Enzymatic Nucleic Acid
  misc_feature (31)..(31): n stands for inosine
ugggucuccugaugaggccguuaggccgaanacugggc

SEQ ID NO: 16133 - RNA, 38 nt, Artificial Sequence
  Description of Artificial Sequence:  Enzymatic Nucleic Acid
  misc_feature (31)..(31): n stands for inosine
aaaacgugcugaugaggccguuaggccgaanucucuga

SEQ ID NO: 16134 - RNA, 38 nt, Artificial Sequence
  Description of Artificial Sequence:  Enzymatic Nucleic Acid
  misc_feature (31)..(31): n stands for inosine
gaaaacgucugaugaggccguuaggccgaangucucug

SEQ ID NO: 16135 - RNA, 38 nt, Artificial Sequence
  Description of Artificial Sequence:  Enzymatic Nucleic Acid
  misc_feature (31)..(31): n stands for inosine
ugaaaacgcugaugaggccguuaggccgaanggucucu

SEQ ID NO: 16136 - RNA, 38 nt, Artificial Sequence
  Description of Artificial Sequence:  Enzymatic Nucleic Acid
  misc_feature (31)..(31): n stands for inosine
accaacuccugaugaggccguuaggccgaanaaaacgu

SEQ ID NO: 16137 - RNA, 38 nt, Artificial Sequence
  Description of Artificial Sequence:  Enzymatic Nucleic Acid
  misc_feature (31)..(31): n stands for inosine
uucccaaacugaugaggccguuaggccgaanuuccacc

SEQ ID NO: 16138 - RNA, 38 nt, Artificial Sequence
  Description of Artificial Sequence:  Enzymatic Nucleic Acid
  misc_feature (31)..(31): n stands for inosine
cuugcaagcugaugaggccguuaggccgaanauuuccc

SEQ ID NO: 16139 - RNA, 38 nt, Artificial Sequence
  Description of Artificial Sequence:  Enzymatic Nucleic Acid
  misc_feature (31)..(31): n stands for inosine
agcuugcacugaugaggccguuaggccgaanagauuuc

SEQ ID NO: 16140 - RNA, 38 nt, Artificial Sequence
  Description of Artificial Sequence:  Enzymatic Nucleic Acid
  misc_feature (31)..(31): n stands for inosine
cauuagcucugaugaggccguuaggccgaancaagaga

SEQ ID NO: 16141 - RNA, 38 nt, Artificial Sequence
  Description of Artificial Sequence:  Enzymatic Nucleic Acid
  misc_feature (31)..(31): n stands for inosine
ugagcauucugaugaggccguuaggccgaancuugcaa

SEQ ID NO: 16142 - RNA, 38 nt, Artificial Sequence
  Description of Artificial Sequence:  Enzymatic Nucleic Acid
  misc_feature (31)..(31): n stands for inosine
uccugcugcugaugaggccguuaggccgaancauuagc

SEQ ID NO: 16143 - RNA, 38 nt, Artificial Sequence
  Description of Artificial Sequence:  Enzymatic Nucleic Acid
  misc_feature (31)..(31): n stands for inosine
cauccugccugaugaggccguuaggccgaanagcauua

SEQ ID NO: 16144 - RNA, 38 nt, Artificial Sequence
  Description of Artificial Sequence:  Enzymatic Nucleic Acid
  misc_feature (31)..(31): n stands for inosine
ugccaucccugaugaggccguuaggccgaancugagca

SEQ ID NO: 16145 - RNA, 38 nt, Artificial Sequence
  Description of Artificial Sequence:  Enzymatic Nucleic Acid
  misc_feature (31)..(31): n stands for inosine
guagucuucugaugaggccguuaggccgaanccauccu

SEQ ID NO: 16146 - RNA, 38 nt, Artificial Sequence
  Description of Artificial Sequence:  Enzymatic Nucleic Acid
  misc_feature (31)..(31): n stands for inosine
aacaaugucugaugaggccguuaggccgaanucuuugc

SEQ ID NO: 16147 - RNA, 38 nt, Artificial Sequence
  Description of Artificial Sequence:  Enzymatic Nucleic Acid
  misc_feature (31)..(31): n stands for inosine
aagaacaacugaugaggccguuaggccgaanuagucuu

SEQ ID NO: 16148 - RNA, 38 nt, Artificial Sequence
  Description of Artificial Sequence:  Enzymatic Nucleic Acid
  misc_feature (31)..(31): n stands for inosine
auaucggacugaugaggccguuaggccgaanaacaaug

SEQ ID NO: 16149 - RNA, 38 nt, Artificial Sequence
  Description of Artificial Sequence:  Enzymatic Nucleic Acid
  misc_feature (31)..(31): n stands for inosine
cugauauccugaugaggccguuaggccgaanaagaaca

SEQ ID NO: 16150 - RNA, 38 nt, Artificial Sequence
  Description of Artificial Sequence:  Enzymatic Nucleic Acid
  misc_feature (31)..(31): n stands for inosine
aaagucuccugaugaggccguuaggccgaanauaucgg

SEQ ID NO: 16151 - RNA, 38 nt, Artificial Sequence
  Description of Artificial Sequence:  Enzymatic Nucleic Acid
  misc_feature (31)..(31): n stands for inosine
augcucaacugaugaggccguuaggccgaanucucuga

SEQ ID NO: 16152 - RNA, 38 nt, Artificial Sequence
  Description of Artificial Sequence:  Enzymatic Nucleic Acid
  misc_feature (31)..(31): n stands for inosine
cucuuccacugaugaggccguuaggccgaancucaaag

SEQ ID NO: 16153 - RNA, 38 nt, Artificial Sequence
  Description of Artificial Sequence:  Enzymatic Nucleic Acid
  misc_feature (31)..(31): n stands for inosine
gagagucccugaugaggccguuaggccgaanaauccuc

SEQ ID NO: 16154 - RNA, 38 nt, Artificial Sequence
  Description of Artificial Sequence:  Enzymatic Nucleic Acid
  misc_feature (31)..(31): n stands for inosine
gcagagagcugaugaggccguuaggccgaanuccagaa

SEQ ID NO: 16155 - RNA, 38 nt, Artificial Sequence
  Description of Artificial Sequence:  Enzymatic Nucleic Acid
  misc_feature (31)..(31): n stands for inosine
aggcagagcugaugaggccguuaggccgaanaguccag

SEQ ID NO: 16156 - RNA, 38 nt, Artificial Sequence
  Description of Artificial Sequence:  Enzymatic Nucleic Acid
  misc_feature (31)..(31): n stands for inosine
guaggcagcugaugaggccguuaggccgaanagagucc

SEQ ID NO: 16157 - RNA, 38 nt, Artificial Sequence
  Description of Artificial Sequence:  Enzymatic Nucleic Acid
  misc_feature (31)..(31): n stands for inosine
agguaggccugaugaggccguuaggccgaanagagagu

SEQ ID NO: 16158 - RNA, 38 nt, Artificial Sequence
  Description of Artificial Sequence:  Enzymatic Nucleic Acid
  misc_feature (31)..(31): n stands for inosine
gugagguacugaugaggccguuaggccgaancagagag

SEQ ID NO: 16159 - RNA, 38 nt, Artificial Sequence
  Description of Artificial Sequence:  Enzymatic Nucleic Acid
  misc_feature (31)..(31): n stands for inosine
ggugaggucugaugaggccguuaggccgaangcagaga

SEQ ID NO: 16160 - RNA, 38 nt, Artificial Sequence
  Description of Artificial Sequence:  Enzymatic Nucleic Acid
  misc_feature (31)..(31): n stands for inosine
acaggugacugaugaggccguuaggccgaanuaggcag

SEQ ID NO: 16161 - RNA, 38 nt, Artificial Sequence
  Description of Artificial Sequence:  Enzymatic Nucleic Acid
  misc_feature (31)..(31): n stands for inosine
aacaggugcugaugaggccguuaggccgaanguaggca

SEQ ID NO: 16162 - RNA, 38 nt, Artificial Sequence
  Description of Artificial Sequence:  Enzymatic Nucleic Acid
  misc_feature (31)..(31): n stands for inosine
gaaacaggcugaugaggccguuaggccgaanagguagg

SEQ ID NO: 16163 - RNA, 38 nt, Artificial Sequence
  Description of Artificial Sequence:  Enzymatic Nucleic Acid
  misc_feature (31)..(31): n stands for inosine
aggaaacacugaugaggccguuaggccgaanugaggua

SEQ ID NO: 16164 - RNA, 38 nt, Artificial Sequence
  Description of Artificial Sequence:  Enzymatic Nucleic Acid
  misc_feature (31)..(31): n stands for inosine
caggaaaccugaugaggccguuaggccgaangugaggu

SEQ ID NO: 16165 - RNA, 38 nt, Artificial Sequence
  Description of Artificial Sequence:  Enzymatic Nucleic Acid
  misc_feature (31)..(31): n stands for inosine
uccauacacugaugaggccguuaggccgaanaaacagg

SEQ ID NO: 16166 - RNA, 38 nt, Artificial Sequence
  Description of Artificial Sequence:  Enzymatic Nucleic Acid
  misc_feature (31)..(31): n stands for inosine
cuccauaccugaugaggccguuaggccgaangaaacag

SEQ ID NO: 16167 - RNA, 38 nt, Artificial Sequence
  Description of Artificial Sequence:  Enzymatic Nucleic Acid
  misc_feature (31)..(31): n stands for inosine
gaauuuggcugaugaggccguuaggccgaanucacaua

SEQ ID NO: 16168 - RNA, 38 nt, Artificial Sequence
  Description of Artificial Sequence:  Enzymatic Nucleic Acid
  misc_feature (31)..(31): n stands for inosine
ggaauuugcugaugaggccguuaggccgaangucacau

SEQ ID NO: 16169 - RNA, 38 nt, Artificial Sequence
  Description of Artificial Sequence:  Enzymatic Nucleic Acid
  misc_feature (31)..(31): n stands for inosine
uggaauuucugaugaggccguuaggccgaanggucaca

SEQ ID NO: 16170 - RNA, 38 nt, Artificial Sequence
  Description of Artificial Sequence:  Enzymatic Nucleic Acid
  misc_feature (31)..(31): n stands for inosine
auggaauucugaugaggccguuaggccgaangggucac

SEQ ID NO: 16171 - RNA, 38 nt, Artificial Sequence
  Description of Artificial Sequence:  Enzymatic Nucleic Acid
  misc_feature (31)..(31): n stands for inosine
gucauaaucugaugaggccguuaggccgaanaauuugg

SEQ ID NO: 16172 - RNA, 38 nt, Artificial Sequence
  Description of Artificial Sequence:  Enzymatic Nucleic Acid
  misc_feature (31)..(31): n stands for inosine
ugucauaacugaugaggccguuaggccgaangaauuug

SEQ ID NO: 16173 - RNA, 38 nt, Artificial Sequence
  Description of Artificial Sequence:  Enzymatic Nucleic Acid
  misc_feature (31)..(31): n stands for inosine
ugcugugucugaugaggccguuaggccgaanucauaau

SEQ ID NO: 16174 - RNA, 38 nt, Artificial Sequence
  Description of Artificial Sequence:  Enzymatic Nucleic Acid
  misc_feature (31)..(31): n stands for inosine
uccugcugcugaugaggccguuaggccgaanuugucau

SEQ ID NO: 16175 - RNA, 38 nt, Artificial Sequence
  Description of Artificial Sequence:  Enzymatic Nucleic Acid
  misc_feature (31)..(31): n stands for inosine
auuccugccugaugaggccguuaggccgaanuguuguc

SEQ ID NO: 16176 - RNA, 38 nt, Artificial Sequence
  Description of Artificial Sequence:  Enzymatic Nucleic Acid
  misc_feature (31)..(31): n stands for inosine
cugauucccugaugaggccguuaggccgaancuguguu

SEQ ID NO: 16177 - RNA, 38 nt, Artificial Sequence
  Description of Artificial Sequence:  Enzymatic Nucleic Acid
  misc_feature (31)..(31): n stands for inosine
auacugaccugaugaggccguuaggccgaanauuccug

SEQ ID NO: 16178 - RNA, 38 nt, Artificial Sequence
  Description of Artificial Sequence:  Enzymatic Nucleic Acid
  misc_feature (31)..(31): n stands for inosine
gcagauaccugaugaggccguuaggccgaanacugauu

SEQ ID NO: 16179 - RNA, 38 nt, Artificial Sequence
  Description of Artificial Sequence:  Enzymatic Nucleic Acid
  misc_feature (31)..(31): n stands for inosine
uguucugccugaugaggccguuaggccgaanauacuga

SEQ ID NO: 16180 - RNA, 38 nt, Artificial Sequence
  Description of Artificial Sequence:  Enzymatic Nucleic Acid
  misc_feature (31)..(31): n stands for inosine
uacuguuccugaugaggccguuaggccgaancagauac

SEQ ID NO: 16181 - RNA, 38 nt, Artificial Sequence
  Description of Artificial Sequence:  Enzymatic Nucleic Acid
  misc_feature (31)..(31): n stands for inosine
ucgcuuaccugaugaggccguuaggccgaanuucugca

SEQ ID NO: 16182 - RNA, 38 nt, Artificial Sequence
  Description of Artificial Sequence:  Enzymatic Nucleic Acid
  misc_feature (31)..(31): n stands for inosine
cacaggcccugaugaggccguuaggccgaancucuuuc

SEQ ID NO: 16183 - RNA, 38 nt, Artificial Sequence
  Description of Artificial Sequence:  Enzymatic Nucleic Acid
  misc_feature (31)..(31): n stands for inosine
cacucacacugaugaggccguuaggccgaanccggcuc

SEQ ID NO: 16184 - RNA, 38 nt, Artificial Sequence
  Description of Artificial Sequence:  Enzymatic Nucleic Acid
  misc_feature (31)..(31): n stands for inosine
acacucaccugaugaggccguuaggccgaangccggcu

SEQ ID NO: 16185 - RNA, 38 nt, Artificial Sequence
  Description of Artificial Sequence:  Enzymatic Nucleic Acid
  misc_feature (31)..(31): n stands for inosine
ucuucaaacugaugaggccguuaggccgaanuuuuuac

SEQ ID NO: 16186 - RNA, 38 nt, Artificial Sequence
  Description of Artificial Sequence:  Enzymatic Nucleic Acid
  misc_feature (31)..(31): n stands for inosine
uucuaacgcugaugaggccguuaggccgaanauaucuu

SEQ ID NO: 16187 - RNA, 38 nt, Artificial Sequence
  Description of Artificial Sequence:  Enzymatic Nucleic Acid
  misc_feature (31)..(31): n stands for inosine
cuucuaaccugaugaggccguuaggccgaangauaucu

SEQ ID NO: 16188 - RNA, 38 nt, Artificial Sequence
  Description of Artificial Sequence:  Enzymatic Nucleic Acid
  misc_feature (31)..(31): n stands for inosine
uuacuucucugaugaggccguuaggccgaanuucuucu

SEQ ID NO: 16189 - RNA, 38 nt, Artificial Sequence
  Description of Artificial Sequence:  Enzymatic Nucleic Acid
  misc_feature (31)..(31): n stands for inosine
uuuacuuccugaugaggccguuaggccgaanguucuuc

SEQ ID NO: 16190 - RNA, 38 nt, Artificial Sequence
  Description of Artificial Sequence:  Enzymatic Nucleic Acid
  misc_feature (31)..(31): n stands for inosine
gucaucugcugaugaggccguuaggccgaanauuacuu

SEQ ID NO: 16191 - RNA, 38 nt, Artificial Sequence
  Description of Artificial Sequence:  Enzymatic Nucleic Acid
  misc_feature (31)..(31): n stands for inosine
ugucaucucugaugaggccguuaggccgaangauuacu

SEQ ID NO: 16192 - RNA, 38 nt, Artificial Sequence
  Description of Artificial Sequence:  Enzymatic Nucleic Acid
  misc_feature (31)..(31): n stands for inosine
uugucauccugaugaggccguuaggccgaanggauuac

SEQ ID NO: 16193 - RNA, 38 nt, Artificial Sequence
  Description of Artificial Sequence:  Enzymatic Nucleic Acid
  misc_feature (31)..(31): n stands for inosine
cgucuggucugaugaggccguuaggccgaanucaucug

SEQ ID NO: 16194 - RNA, 38 nt, Artificial Sequence
  Description of Artificial Sequence:  Enzymatic Nucleic Acid
  misc_feature (31)..(31): n stands for inosine
guccgucucugaugaggccguuaggccgaanuugucau

SEQ ID NO: 16195 - RNA, 38 nt, Artificial Sequence
  Description of Artificial Sequence:  Enzymatic Nucleic Acid
  misc_feature (31)..(31): n stands for inosine
uguccguccugaugaggccguuaggccgaanguuguca

SEQ ID NO: 16196 - RNA, 38 nt, Artificial Sequence
  Description of Artificial Sequence:  Enzymatic Nucleic Acid
  misc_feature (31)..(31): n stands for inosine
cauaccaccugaugaggccguuaggccgaanuccgucu

SEQ ID NO: 16197 - RNA, 38 nt, Artificial Sequence
  Description of Artificial Sequence:  Enzymatic Nucleic Acid
  misc_feature (31)..(31): n stands for inosine
cugaggcacugaugaggccguuaggccgaanaaccaua

SEQ ID NO: 16198 - RNA, 38 nt, Artificial Sequence
  Description of Artificial Sequence:  Enzymatic Nucleic Acid
  misc_feature (31)..(31): n stands for inosine
ucuucugacugaugaggccguuaggccgaancaagaac

SEQ ID NO: 16199 - RNA, 38 nt, Artificial Sequence
  Description of Artificial Sequence:  Enzymatic Nucleic Acid
  misc_feature (31)..(31): n stands for inosine
cucuucugcugaugaggccguuaggccgaangcaagaa

SEQ ID NO: 16200 - RNA, 38 nt, Artificial Sequence
  Description of Artificial Sequence:  Enzymatic Nucleic Acid
  misc_feature (31)..(31): n stands for inosine
agcucuuccugaugaggccguuaggccgaanaggcaag

SEQ ID NO: 16201 - RNA, 38 nt, Artificial Sequence
  Description of Artificial Sequence:  Enzymatic Nucleic Acid
  misc_feature (31)..(31): n stands for inosine
aaguuuuccugaugaggccguuaggccgaancucuucu

SEQ ID NO: 16202 - RNA, 38 nt, Artificial Sequence
  Description of Artificial Sequence:  Enzymatic Nucleic Acid
  misc_feature (31)..(31): n stands for inosine
ucuuccaacugaugaggccguuaggccgaanuuuucag

SEQ ID NO: 16203 - RNA, 38 nt, Artificial Sequence
  Description of Artificial Sequence:  Enzymatic Nucleic Acid
  misc_feature (31)..(31): n stands for inosine
uuugguuccugaugaggccguuaggccgaanucuucca

SEQ ID NO: 16204 - RNA, 38 nt, Artificial Sequence
  Description of Artificial Sequence:  Enzymatic Nucleic Acid
  misc_feature (31)..(31): n stands for inosine
gauaauuucugaugaggccguuaggccgaanuucuguc

SEQ ID NO: 16205 - RNA, 38 nt, Artificial Sequence
  Description of Artificial Sequence:  Enzymatic Nucleic Acid
  misc_feature (31)..(31): n stands for inosine
agauaauucugaugaggccguuaggccgaanguucugu

SEQ ID NO: 16206 - RNA, 38 nt, Artificial Sequence
  Description of Artificial Sequence:  Enzymatic Nucleic Acid
  misc_feature (31)..(31): n stands for inosine
aaagauggcugaugaggccguuaggccgaanauaauuu

SEQ ID NO: 16207 - RNA, 38 nt, Artificial Sequence
  Description of Artificial Sequence:  Enzymatic Nucleic Acid
  misc_feature (31)..(31): n stands for inosine
caaaagaucugaugaggccguuaggccgaanagauaau

SEQ ID NO: 16208 - RNA, 38 nt, Artificial Sequence
  Description of Artificial Sequence:  Enzymatic Nucleic Acid
  misc_feature (31)..(31): n stands for inosine
ccaaaagacugaugaggccguuaggccgaangagauaa

SEQ ID NO: 16209 - RNA, 38 nt, Artificial Sequence
  Description of Artificial Sequence:  Enzymatic Nucleic Acid
  misc_feature (31)..(31): n stands for inosine
ccaccaaacugaugaggccguuaggccgaanauggaga

SEQ ID NO: 16210 - RNA, 38 nt, Artificial Sequence
  Description of Artificial Sequence:  Enzymatic Nucleic Acid
  misc_feature (31)..(31): n stands for inosine
uuuugcugcugaugaggccguuaggccgaancaccauu

SEQ ID NO: 16211 - RNA, 38 nt, Artificial Sequence
  Description of Artificial Sequence:  Enzymatic Nucleic Acid
  misc_feature (31)..(31): n stands for inosine
cuuuugcucugaugaggccguuaggccgaangcaccau

SEQ ID NO: 16212 - RNA, 38 nt, Artificial Sequence
  Description of Artificial Sequence:  Enzymatic Nucleic Acid
  misc_feature (31)..(31): n stands for inosine
gcuuuugccugaugaggccguuaggccgaanggcacca

SEQ ID NO: 16213 - RNA, 38 nt, Artificial Sequence
  Description of Artificial Sequence:  Enzymatic Nucleic Acid
  misc_feature (31)..(31): n stands for inosine
ccugcuuucugaugaggccguuaggccgaancugggca

SEQ ID NO: 16214 - RNA, 38 nt, Artificial Sequence
  Description of Artificial Sequence:  Enzymatic Nucleic Acid
  misc_feature (31)..(31): n stands for inosine
agacuccccugaugaggccguuaggccgaancuuuugc

SEQ ID NO: 16215 - RNA, 38 nt, Artificial Sequence
  Description of Artificial Sequence:  Enzymatic Nucleic Acid
  misc_feature (31)..(31): n stands for inosine
gaugccaccugaugaggccguuaggccgaanacucccu

SEQ ID NO: 16216 - RNA, 38 nt, Artificial Sequence
  Description of Artificial Sequence:  Enzymatic Nucleic Acid
  misc_feature (31)..(31): n stands for inosine
ccuucagacugaugaggccguuaggccgaanccacaga

SEQ ID NO: 16217 - RNA, 38 nt, Artificial Sequence
  Description of Artificial Sequence:  Enzymatic Nucleic Acid
  misc_feature (31)..(31): n stands for inosine
gagccuuccugaugaggccguuaggccgaanaugccac

SEQ ID NO: 16218 - RNA, 38 nt, Artificial Sequence
  Description of Artificial Sequence:  Enzymatic Nucleic Acid
  misc_feature (31)..(31): n stands for inosine
cugguuugcugaugaggccguuaggccgaanccuucag

SEQ ID NO: 16219 - RNA, 38 nt, Artificial Sequence
  Description of Artificial Sequence:  Enzymatic Nucleic Acid
  misc_feature (31)..(31): n stands for inosine
gucugguucugaugaggccguuaggccgaanagccuuc

SEQ ID NO: 16220 - RNA, 38 nt, Artificial Sequence
  Description of Artificial Sequence:  Enzymatic Nucleic Acid
  misc_feature (31)..(31): n stands for inosine
gcuugucucugaugaggccguuaggccgaanuuugagc

SEQ ID NO: 16221 - RNA, 38 nt, Artificial Sequence
  Description of Artificial Sequence:  Enzymatic Nucleic Acid
  misc_feature (31)..(31): n stands for inosine
cgcuuguccugaugaggccguuaggccgaanguuugag

SEQ ID NO: 16222 - RNA, 38 nt, Artificial Sequence
  Description of Artificial Sequence:  Enzymatic Nucleic Acid
  misc_feature (31)..(31): n stands for inosine
uagccgcucugaugaggccguuaggccgaanucugguu

SEQ ID NO: 16223 - RNA, 38 nt, Artificial Sequence
  Description of Artificial Sequence:  Enzymatic Nucleic Acid
  misc_feature (31)..(31): n stands for inosine
ggacuggucugaugaggccguuaggccgaanccgcuug

SEQ ID NO: 16224 - RNA, 38 nt, Artificial Sequence
  Description of Artificial Sequence:  Enzymatic Nucleic Acid
  misc_feature (31)..(31): n stands for inosine
uccggacucugaugaggccguuaggccgaanuagccgc

SEQ ID NO: 16225 - RNA, 38 nt, Artificial Sequence
  Description of Artificial Sequence:  Enzymatic Nucleic Acid
  misc_feature (31)..(31): n stands for inosine
auccggaccugaugaggccguuaggccgaanguagccg

SEQ ID NO: 16226 - RNA, 38 nt, Artificial Sequence
  Description of Artificial Sequence:  Enzymatic Nucleic Acid
  misc_feature (31)..(31): n stands for inosine
ugauaucccugaugaggccguuaggccgaanacuggua

SEQ ID NO: 16227 - RNA, 38 nt, Artificial Sequence
  Description of Artificial Sequence:  Enzymatic Nucleic Acid
  misc_feature (31)..(31): n stands for inosine
caucggagcugaugaggccguuaggccgaanauauccg

SEQ ID NO: 16228 - RNA, 38 nt, Artificial Sequence
  Description of Artificial Sequence:  Enzymatic Nucleic Acid
  misc_feature (31)..(31): n stands for inosine
gucaucggcugaugaggccguuaggccgaanugauauc

SEQ ID NO: 16229 - RNA, 38 nt, Artificial Sequence
  Description of Artificial Sequence:  Enzymatic Nucleic Acid
  misc_feature (31)..(31): n stands for inosine
gugucauccugaugaggccguuaggccgaanagugaua

SEQ ID NO: 16230 - RNA, 38 nt, Artificial Sequence
  Description of Artificial Sequence:  Enzymatic Nucleic Acid
  misc_feature (31)..(31): n stands for inosine
ggugucugcugaugaggccguuaggccgaanucaucgg

SEQ ID NO: 16231 - RNA, 38 nt, Artificial Sequence
  Description of Artificial Sequence:  Enzymatic Nucleic Acid
  misc_feature (31)..(31): n stands for inosine
gugguguccugaugaggccguuaggccgaanugucauc

SEQ ID NO: 16232 - RNA, 38 nt, Artificial Sequence
  Description of Artificial Sequence:  Enzymatic Nucleic Acid
  misc_feature (31)..(31): n stands for inosine
cacgguggcugaugaggccguuaggccgaanucugugu

SEQ ID NO: 16233 - RNA, 38 nt, Artificial Sequence
  Description of Artificial Sequence:  Enzymatic Nucleic Acid
  misc_feature (31)..(31): n stands for inosine
uacacggucugaugaggccguuaggccgaanugucugu

SEQ ID NO: 16234 - RNA, 38 nt, Artificial Sequence
  Description of Artificial Sequence:  Enzymatic Nucleic Acid
  misc_feature (31)..(31): n stands for inosine
guacacggcugaugaggccguuaggccgaangugucug

SEQ ID NO: 16235 - RNA, 38 nt, Artificial Sequence
  Description of Artificial Sequence:  Enzymatic Nucleic Acid
  misc_feature (31)..(31): n stands for inosine
gaguacaccugaugaggccguuaggccgaanugguguc

SEQ ID NO: 16236 - RNA, 38 nt, Artificial Sequence
  Description of Artificial Sequence:  Enzymatic Nucleic Acid
  misc_feature (31)..(31): n stands for inosine
cucacuggcugaugaggccguuaggccgaanuacacgg

SEQ ID NO: 16237 - RNA, 38 nt, Artificial Sequence
  Description of Artificial Sequence:  Enzymatic Nucleic Acid
  misc_feature (31)..(31): n stands for inosine
uccucacucugaugaggccguuaggccgaanaguacac

SEQ ID NO: 16238 - RNA, 38 nt, Artificial Sequence
  Description of Artificial Sequence:  Enzymatic Nucleic Acid
  misc_feature (31)..(31): n stands for inosine
uuccucaccugaugaggccguuaggccgaangaguaca

SEQ ID NO: 16239 - RNA, 38 nt, Artificial Sequence
  Description of Artificial Sequence:  Enzymatic Nucleic Acid
  misc_feature (31)..(31): n stands for inosine
aaaaguuccugaugaggccguuaggccgaancuuccuc

SEQ ID NO: 16240 - RNA, 38 nt, Artificial Sequence
  Description of Artificial Sequence:  Enzymatic Nucleic Acid
  misc_feature (31)..(31): n stands for inosine
gcuuuaaacugaugaggccguuaggccgaanuucugcu

SEQ ID NO: 16241 - RNA, 38 nt, Artificial Sequence
  Description of Artificial Sequence:  Enzymatic Nucleic Acid
  misc_feature (31)..(31): n stands for inosine
ucucuauccugaugaggccguuaggccgaancuuuaaa

SEQ ID NO: 16242 - RNA, 38 nt, Artificial Sequence
  Description of Artificial Sequence:  Enzymatic Nucleic Acid
  misc_feature (31)..(31): n stands for inosine
uaccgguucugaugaggccguuaggccgaancacucca

SEQ ID NO: 16243 - RNA, 38 nt, Artificial Sequence
  Description of Artificial Sequence:  Enzymatic Nucleic Acid
  misc_feature (31)..(31): n stands for inosine
gugcuacccugaugaggccguuaggccgaanuuugcac

SEQ ID NO: 16244 - RNA, 38 nt, Artificial Sequence
  Description of Artificial Sequence:  Enzymatic Nucleic Acid
  misc_feature (31)..(31): n stands for inosine
cugggcugcugaugaggccguuaggccgaancuaccgg

SEQ ID NO: 16245 - RNA, 38 nt, Artificial Sequence
  Description of Artificial Sequence:  Enzymatic Nucleic Acid
  misc_feature (31)..(31): n stands for inosine
aucugggccugaugaggccguuaggccgaanugcuacc

SEQ ID NO: 16246 - RNA, 38 nt, Artificial Sequence
  Description of Artificial Sequence:  Enzymatic Nucleic Acid
  misc_feature (31)..(31): n stands for inosine
agaaucugcugaugaggccguuaggccgaancugugcu

SEQ ID NO: 16247 - RNA, 38 nt, Artificial Sequence
  Description of Artificial Sequence:  Enzymatic Nucleic Acid
  misc_feature (31)..(31): n stands for inosine
gagaaucucugaugaggccguuaggccgaangcugugc

SEQ ID NO: 16248 - RNA, 38 nt, Artificial Sequence
  Description of Artificial Sequence:  Enzymatic Nucleic Acid
  misc_feature (31)..(31): n stands for inosine
ggagaauccugaugaggccguuaggccgaanggcugug

SEQ ID NO: 16249 - RNA, 38 nt, Artificial Sequence
  Description of Artificial Sequence:  Enzymatic Nucleic Acid
  misc_feature (31)..(31): n stands for inosine
caggcuggcugaugaggccguuaggccgaanaaucugg

SEQ ID NO: 16250 - RNA, 38 nt, Artificial Sequence
  Description of Artificial Sequence:  Enzymatic Nucleic Acid
  misc_feature (31)..(31): n stands for inosine
gucaggcucugaugaggccguuaggccgaanagaaucu

SEQ ID NO: 16251 - RNA, 38 nt, Artificial Sequence
  Description of Artificial Sequence:  Enzymatic Nucleic Acid
  misc_feature (31)..(31): n stands for inosine
ugucaggccugaugaggccguuaggccgaangagaauc

SEQ ID NO: 16252 - RNA, 38 nt, Artificial Sequence
  Description of Artificial Sequence:  Enzymatic Nucleic Acid
  misc_feature (31)..(31): n stands for inosine
ccgugucacugaugaggccguuaggccgaancuggaga

SEQ ID NO: 16253 - RNA, 38 nt, Artificial Sequence
  Description of Artificial Sequence:  Enzymatic Nucleic Acid
  misc_feature (31)..(31): n stands for inosine
cccguguccugaugaggccguuaggccgaangcuggag

SEQ ID NO: 16254 - RNA, 38 nt, Artificial Sequence
  Description of Artificial Sequence:  Enzymatic Nucleic Acid
  misc_feature (31)..(31): n stands for inosine
gguccccgcugaugaggccguuaggccgaanucaggcu

SEQ ID NO: 16255 - RNA, 38 nt, Artificial Sequence
  Description of Artificial Sequence:  Enzymatic Nucleic Acid
  misc_feature (31)..(31): n stands for inosine
cucagugucugaugaggccguuaggccgaanuccccgu

SEQ ID NO: 16256 - RNA, 38 nt, Artificial Sequence
  Description of Artificial Sequence:  Enzymatic Nucleic Acid
  misc_feature (31)..(31): n stands for inosine
gcucagugcugaugaggccguuaggccgaanguccccg

SEQ ID NO: 16257 - RNA, 38 nt, Artificial Sequence
  Description of Artificial Sequence:  Enzymatic Nucleic Acid
  misc_feature (31)..(31): n stands for inosine
gagcucagcugaugaggccguuaggccgaanugguccc

SEQ ID NO: 16258 - RNA, 38 nt, Artificial Sequence
  Description of Artificial Sequence:  Enzymatic Nucleic Acid
  misc_feature (31)..(31): n stands for inosine
gagagcuccugaugaggccguuaggccgaanugugguc

SEQ ID NO: 16259 - RNA, 38 nt, Artificial Sequence
  Description of Artificial Sequence:  Enzymatic Nucleic Acid
  misc_feature (31)..(31): n stands for inosine
aggaggagcugaugaggccguuaggccgaancucagug

SEQ ID NO: 16260 - RNA, 38 nt, Artificial Sequence
  Description of Artificial Sequence:  Enzymatic Nucleic Acid
  misc_feature (31)..(31): n stands for inosine
acaggaggcugaugaggccguuaggccgaanagcucag

SEQ ID NO: 16261 - RNA, 38 nt, Artificial Sequence
  Description of Artificial Sequence:  Enzymatic Nucleic Acid
  misc_feature (31)..(31): n stands for inosine
aaacaggacugaugaggccguuaggccgaanagagcuc

SEQ ID NO: 16262 - RNA, 38 nt, Artificial Sequence
  Description of Artificial Sequence:  Enzymatic Nucleic Acid
  misc_feature (31)..(31): n stands for inosine
uaaacaggcugaugaggccguuaggccgaangagagcu

SEQ ID NO: 16263 - RNA, 38 nt, Artificial Sequence
  Description of Artificial Sequence:  Enzymatic Nucleic Acid
  misc_feature (31)..(31): n stands for inosine
uuuaaacacugaugaggccguuaggccgaanaggagag

SEQ ID NO: 16264 - RNA, 38 nt, Artificial Sequence
  Description of Artificial Sequence:  Enzymatic Nucleic Acid
  misc_feature (31)..(31): n stands for inosine
uuuuaaaccugaugaggccguuaggccgaangaggaga

SEQ ID NO: 16265 - RNA, 38 nt, Artificial Sequence
  Description of Artificial Sequence:  Enzymatic Nucleic Acid
  misc_feature (31)..(31): n stands for inosine
gguguggacugaugaggccguuaggccgaancuuccuu

SEQ ID NO: 16266 - RNA, 38 nt, Artificial Sequence
  Description of Artificial Sequence:  Enzymatic Nucleic Acid
  misc_feature (31)..(31): n stands for inosine
uggggugucugaugaggccguuaggccgaanaugcuuc

SEQ ID NO: 16267 - RNA, 38 nt, Artificial Sequence
  Description of Artificial Sequence:  Enzymatic Nucleic Acid
  misc_feature (31)..(31): n stands for inosine
uuggggugcugaugaggccguuaggccgaangaugcuu

SEQ ID NO: 16268 - RNA, 38 nt, Artificial Sequence
  Description of Artificial Sequence:  Enzymatic Nucleic Acid
  misc_feature (31)..(31): n stands for inosine
aguuggggcugaugaggccguuaggccgaanuggaugc

SEQ ID NO: 16269 - RNA, 38 nt, Artificial Sequence
  Description of Artificial Sequence:  Enzymatic Nucleic Acid
  misc_feature (31)..(31): n stands for inosine
ggaguuggcugaugaggccguuaggccgaanuguggau

SEQ ID NO: 16270 - RNA, 38 nt, Artificial Sequence
  Description of Artificial Sequence:  Enzymatic Nucleic Acid
  misc_feature (31)..(31): n stands for inosine
gggaguugcugaugaggccguuaggccgaangugugga

SEQ ID NO: 16271 - RNA, 38 nt, Artificial Sequence
  Description of Artificial Sequence:  Enzymatic Nucleic Acid
  misc_feature (31)..(31): n stands for inosine
cgggaguucugaugaggccguuaggccgaanggugugg

SEQ ID NO: 16272 - RNA, 38 nt, Artificial Sequence
  Description of Artificial Sequence:  Enzymatic Nucleic Acid
  misc_feature (31)..(31): n stands for inosine
ccgggagucugaugaggccguuaggccgaangggugug

SEQ ID NO: 16273 - RNA, 38 nt, Artificial Sequence
  Description of Artificial Sequence:  Enzymatic Nucleic Acid
  misc_feature (31)..(31): n stands for inosine
uguccgggcugaugaggccguuaggccgaanuuggggu

SEQ ID NO: 16274 - RNA, 38 nt, Artificial Sequence
  Description of Artificial Sequence:  Enzymatic Nucleic Acid
  misc_feature (31)..(31): n stands for inosine
gauguccgcugaugaggccguuaggccgaanaguuggg

SEQ ID NO: 16275 - RNA, 38 nt, Artificial Sequence
  Description of Artificial Sequence:  Enzymatic Nucleic Acid
  misc_feature (31)..(31): n stands for inosine
ugaugucccugaugaggccguuaggccgaangaguugg

SEQ ID NO: 16276 - RNA, 38 nt, Artificial Sequence
  Description of Artificial Sequence:  Enzymatic Nucleic Acid
  misc_feature (31)..(31): n stands for inosine
ucaugugacugaugaggccguuaggccgaanuccggga

SEQ ID NO: 16277 - RNA, 38 nt, Artificial Sequence
  Description of Artificial Sequence:  Enzymatic Nucleic Acid
  misc_feature (31)..(31): n stands for inosine
cucucaugcugaugaggccguuaggccgaanauguccg

SEQ ID NO: 16278 - RNA, 38 nt, Artificial Sequence
  Description of Artificial Sequence:  Enzymatic Nucleic Acid
  misc_feature (31)..(31): n stands for inosine
accucucacugaugaggccguuaggccgaanugauguc

SEQ ID NO: 16279 - RNA, 38 nt, Artificial Sequence
  Description of Artificial Sequence:  Enzymatic Nucleic Acid
  misc_feature (31)..(31): n stands for inosine
aucugagccugaugaggccguuaggccgaanaccucuc

SEQ ID NO: 16280 - RNA, 38 nt, Artificial Sequence
  Description of Artificial Sequence:  Enzymatic Nucleic Acid
  misc_feature (31)..(31): n stands for inosine
aaaaucugcugaugaggccguuaggccgaancagaccu

SEQ ID NO: 16281 - RNA, 38 nt, Artificial Sequence
  Description of Artificial Sequence:  Enzymatic Nucleic Acid
  misc_feature (31)..(31): n stands for inosine
ucaaaauccugaugaggccguuaggccgaanagcagac

SEQ ID NO: 16282 - RNA, 38 nt, Artificial Sequence
  Description of Artificial Sequence:  Enzymatic Nucleic Acid
  misc_feature (31)..(31): n stands for inosine
ugguggaacugaugaggccguuaggccgaanaacaaca

SEQ ID NO: 16283 - RNA, 38 nt, Artificial Sequence
  Description of Artificial Sequence:  Enzymatic Nucleic Acid
  misc_feature (31)..(31): n stands for inosine
cugcuggucugaugaggccguuaggccgaanaaagaac

SEQ ID NO: 16284 - RNA, 38 nt, Artificial Sequence
  Description of Artificial Sequence:  Enzymatic Nucleic Acid
  misc_feature (31)..(31): n stands for inosine
ccugcuggcugaugaggccguuaggccgaangaaagaa

SEQ ID NO: 16285 - RNA, 38 nt, Artificial Sequence
  Description of Artificial Sequence:  Enzymatic Nucleic Acid
  misc_feature (31)..(31): n stands for inosine
uuccugcucugaugaggccguuaggccgaanuggaaag

SEQ ID NO: 16286 - RNA, 38 nt, Artificial Sequence
  Description of Artificial Sequence:  Enzymatic Nucleic Acid
  misc_feature (31)..(31): n stands for inosine
cuuccugccugaugaggccguuaggccgaanguggaaa

SEQ ID NO: 16287 - RNA, 38 nt, Artificial Sequence
  Description of Artificial Sequence:  Enzymatic Nucleic Acid
  misc_feature (31)..(31): n stands for inosine
cuacuucccugaugaggccguuaggccgaancuggugg

SEQ ID NO: 16288 - RNA, 38 nt, Artificial Sequence
  Description of Artificial Sequence:  Enzymatic Nucleic Acid
  misc_feature (31)..(31): n stands for inosine
ucaaaugccugaugaggccguuaggccgaancuacuuc

SEQ ID NO: 16289 - RNA, 38 nt, Artificial Sequence
  Description of Artificial Sequence:  Enzymatic Nucleic Acid
  misc_feature (31)..(31): n stands for inosine
aaaucaaacugaugaggccguuaggccgaancggcuac

SEQ ID NO: 16290 - RNA, 38 nt, Artificial Sequence
  Description of Artificial Sequence:  Enzymatic Nucleic Acid
  misc_feature (31)..(31): n stands for inosine
ugucgaaacugaugaggccguuaggccgaanaaaauca

SEQ ID NO: 16291 - RNA, 38 nt, Artificial Sequence
  Description of Artificial Sequence:  Enzymatic Nucleic Acid
  misc_feature (31)..(31): n stands for inosine
uuuucugucugaugaggccguuaggccgaanucgaaau

SEQ ID NO: 16292 - RNA, 38 nt, Artificial Sequence
  Description of Artificial Sequence:  Enzymatic Nucleic Acid
  misc_feature (31)..(31): n stands for inosine
ccuuuuuccugaugaggccguuaggccgaanuugucga

SEQ ID NO: 16293 - RNA, 38 nt, Artificial Sequence
  Description of Artificial Sequence:  Enzymatic Nucleic Acid
  misc_feature (31)..(31): n stands for inosine
caguccgacugaugaggccguuaggccgaanuccuuuu

SEQ ID NO: 16294 - RNA, 38 nt, Artificial Sequence
  Description of Artificial Sequence:  Enzymatic Nucleic Acid
  misc_feature (31)..(31): n stands for inosine
gcaguccgcugaugaggccguuaggccgaanguccuuu

SEQ ID NO: 16295 - RNA, 38 nt, Artificial Sequence
  Description of Artificial Sequence:  Enzymatic Nucleic Acid
  misc_feature (31)..(31): n stands for inosine
cucccugccugaugaggccguuaggccgaanuccgagg

SEQ ID NO: 16296 - RNA, 38 nt, Artificial Sequence
  Description of Artificial Sequence:  Enzymatic Nucleic Acid
  misc_feature (31)..(31): n stands for inosine
uggcuccccugaugaggccguuaggccgaancaguccg

SEQ ID NO: 16297 - RNA, 38 nt, Artificial Sequence
  Description of Artificial Sequence:  Enzymatic Nucleic Acid
  misc_feature (31)..(31): n stands for inosine
gaagagcucugaugaggccguuaggccgaancucccug

SEQ ID NO: 16298 - RNA, 38 nt, Artificial Sequence
  Description of Artificial Sequence:  Enzymatic Nucleic Acid
  misc_feature (31)..(31): n stands for inosine
agaagagccugaugaggccguuaggccgaangcucccu

SEQ ID NO: 16299 - RNA, 38 nt, Artificial Sequence
  Description of Artificial Sequence:  Enzymatic Nucleic Acid
  misc_feature (31)..(31): n stands for inosine
ccuagaagcugaugaggccguuaggccgaancuggcuc

SEQ ID NO: 16300 - RNA, 38 nt, Artificial Sequence
  Description of Artificial Sequence:  Enzymatic Nucleic Acid
  misc_feature (31)..(31): n stands for inosine
agccuagacugaugaggccguuaggccgaanagcuggc

SEQ ID NO: 16301 - RNA, 38 nt, Artificial Sequence
  Description of Artificial Sequence:  Enzymatic Nucleic Acid
  misc_feature (31)..(31): n stands for inosine
acaagccucugaugaggccguuaggccgaanaagagcu

SEQ ID NO: 16302 - RNA, 36 nt, Artificial Sequence
  Description of Artificial Sequence:  Enzymatic Nucleic Acid
gccagugauggcaugcacuaugcgcgagcaccuugc

SEQ ID NO: 16303 - RNA, 36 nt, Artificial Sequence
  Description of Artificial Sequence:  Enzymatic Nucleic Acid
cagggugauggcaugcacuaugcgcggacggccagc

SEQ ID NO: 16304 - RNA, 36 nt, Artificial Sequence
  Description of Artificial Sequence:  Enzymatic Nucleic Acid
ccacgugauggcaugcacuaugcgcgagagccacag

SEQ ID NO: 16305 - RNA, 36 nt, Artificial Sequence
  Description of Artificial Sequence:  Enzymatic Nucleic Acid
agaggugauggcaugcacuaugcgcgggcccggguc

SEQ ID NO: 16306 - RNA, 36 nt, Artificial Sequence
  Description of Artificial Sequence:  Enzymatic Nucleic Acid
cuaggugauggcaugcacuaugcgcgaaacccacag

SEQ ID NO: 16307 - RNA, 36 nt, Artificial Sequence
  Description of Artificial Sequence:  Enzymatic Nucleic Acid
cagauugauggcaugcacuaugcgcgaagagaaaca

SEQ ID NO: 16308 - RNA, 36 nt, Artificial Sequence
  Description of Artificial Sequence:  Enzymatic Nucleic Acid
cugggugauggcaugcacuaugcgcgagaucaagag

SEQ ID NO: 16309 - RNA, 36 nt, Artificial Sequence
  Description of Artificial Sequence:  Enzymatic Nucleic Acid
cccugugauggcaugcacuaugcgcgaaguaauuug

SEQ ID NO: 16310 - RNA, 36 nt, Artificial Sequence
  Description of Artificial Sequence:  Enzymatic Nucleic Acid
uugcuugauggcaugcacuaugcgcgacugccacuc

SEQ ID NO: 16311 - RNA, 36 nt, Artificial Sequence
  Description of Artificial Sequence:  Enzymatic Nucleic Acid
ucaguugauggcaugcacuaugcgcgaccuccaccc

SEQ ID NO: 16312 - RNA, 36 nt, Artificial Sequence
  Description of Artificial Sequence:  Enzymatic Nucleic Acid
gcacuugauggcaugcacuaugcgcgagucaccucc

SEQ ID NO: 16313 - RNA, 36 nt, Artificial Sequence
  Description of Artificial Sequence:  Enzymatic Nucleic Acid
cgcugugauggcaugcacuaugcgcgacucagucac

SEQ ID NO: 16314 - RNA, 36 nt, Artificial Sequence
  Description of Artificial Sequence:  Enzymatic Nucleic Acid
gccauugauggcaugcacuaugcgcggcugcacuca

SEQ ID NO: 16315 - RNA, 36 nt, Artificial Sequence
  Description of Artificial Sequence:  Enzymatic Nucleic Acid
ccgauugauggcaugcacuaugcgcgacuuuuggaa

SEQ ID NO: 16316 - RNA, 36 nt, Artificial Sequence
  Description of Artificial Sequence:  Enzymatic Nucleic Acid
aguguugauggcaugcacuaugcgcgauuuccgauc

SEQ ID NO: 16317 - RNA, 36 nt, Artificial Sequence
  Description of Artificial Sequence:  Enzymatic Nucleic Acid
agaagugauggcaugcacuaugcgcgacuuguaggc

SEQ ID NO: 16318 - RNA, 36 nt, Artificial Sequence
  Description of Artificial Sequence:  Enzymatic Nucleic Acid
caaguugauggcaugcacuaugcgcgaguuucccgg

SEQ ID NO: 16319 - RNA, 36 nt, Artificial Sequence
  Description of Artificial Sequence:  Enzymatic Nucleic Acid
agaagugauggcaugcacuaugcgcgaauaaaugga

SEQ ID NO: 16320 - RNA, 36 nt, Artificial Sequence
  Description of Artificial Sequence:  Enzymatic Nucleic Acid
uugguugauggcaugcacuaugcgcgacuaacagaa

SEQ ID NO: 16321 - RNA, 36 nt, Artificial Sequence
  Description of Artificial Sequence:  Enzymatic Nucleic Acid
guucuugauggcaugcacuaugcgcgaguaauguac

SEQ ID NO: 16322 - RNA, 36 nt, Artificial Sequence
  Description of Artificial Sequence:  Enzymatic Nucleic Acid
ggaauugauggcaugcacuaugcgcgaccacaguuu

SEQ ID NO: 16323 - RNA, 36 nt, Artificial Sequence
  Description of Artificial Sequence:  Enzymatic Nucleic Acid
ucuugugauggcaugcacuaugcgcgacaaagugac

SEQ ID NO: 16324 - RNA, 36 nt, Artificial Sequence
  Description of Artificial Sequence:  Enzymatic Nucleic Acid
accauugauggcaugcacuaugcgcgaggaacaaau

SEQ ID NO: 16325 - RNA, 36 nt, Artificial Sequence
  Description of Artificial Sequence:  Enzymatic Nucleic Acid
cugauugauggcaugcacuaugcgcgauguagcugg

SEQ ID NO: 16326 - RNA, 36 nt, Artificial Sequence
  Description of Artificial Sequence:  Enzymatic Nucleic Acid
gccagugauggcaugcacuaugcgcgauagcugauc

SEQ ID NO: 16327 - RNA, 36 nt, Artificial Sequence
  Description of Artificial Sequence:  Enzymatic Nucleic Acid
ugcuuugauggcaugcacuaugcgcgacagaagacc

SEQ ID NO: 16328 - RNA, 36 nt, Artificial Sequence
  Description of Artificial Sequence:  Enzymatic Nucleic Acid
uucauugauggcaugcacuaugcgcgauuaauuuuu

SEQ ID NO: 16329 - RNA, 36 nt, Artificial Sequence
  Description of Artificial Sequence:  Enzymatic Nucleic Acid
acuuuugauggcaugcacuaugcgcgaucauuaauu

SEQ ID NO: 16330 - RNA, 36 nt, Artificial Sequence
  Description of Artificial Sequence:  Enzymatic Nucleic Acid
cacauugauggcaugcacuaugcgcgauaaauccua

SEQ ID NO: 16331 - RNA, 36 nt, Artificial Sequence
  Description of Artificial Sequence:  Enzymatic Nucleic Acid
ggacuugauggcaugcacuaugcgcgagaaccacau

SEQ ID NO: 16332 - RNA, 36 nt, Artificial Sequence
  Description of Artificial Sequence:  Enzymatic Nucleic Acid
uaguuugauggcaugcacuaugcgcgaauuccauga

SEQ ID NO: 16333 - RNA, 36 nt, Artificial Sequence
  Description of Artificial Sequence:  Enzymatic Nucleic Acid
uaguuugauggcaugcacuaugcgcgaguucuugcu

SEQ ID NO: 16334 - RNA, 36 nt, Artificial Sequence
  Description of Artificial Sequence:  Enzymatic Nucleic Acid
gaaguugauggcaugcacuaugcgcgaauccccaca

SEQ ID NO: 16335 - RNA, 36 nt, Artificial Sequence
  Description of Artificial Sequence:  Enzymatic Nucleic Acid
ugcuuugauggcaugcacuaugcgcggaagaagggu

SEQ ID NO: 16336 - RNA, 36 nt, Artificial Sequence
  Description of Artificial Sequence:  Enzymatic Nucleic Acid
ggucuugauggcaugcacuaugcgcggguuuacaag

SEQ ID NO: 16337 - RNA, 36 nt, Artificial Sequence
  Description of Artificial Sequence:  Enzymatic Nucleic Acid
caucuugauggcaugcacuaugcgcgacucccagac

SEQ ID NO: 16338 - RNA, 36 nt, Artificial Sequence
  Description of Artificial Sequence:  Enzymatic Nucleic Acid
uucuuugauggcaugcacuaugcgcgaucucacucc

SEQ ID NO: 16339 - RNA, 36 nt, Artificial Sequence
  Description of Artificial Sequence:  Enzymatic Nucleic Acid
gugcuugauggcaugcacuaugcgcgaaaaauuucu

SEQ ID NO: 16340 - RNA, 36 nt, Artificial Sequence
  Description of Artificial Sequence:  Enzymatic Nucleic Acid
uugguugauggcaugcacuaugcgcgacuccggguu

SEQ ID NO: 16341 - RNA, 36 nt, Artificial Sequence
  Description of Artificial Sequence:  Enzymatic Nucleic Acid
ugcugugauggcaugcacuaugcgcgacagguguac

SEQ ID NO: 16342 - RNA, 36 nt, Artificial Sequence
  Description of Artificial Sequence:  Enzymatic Nucleic Acid
gucauugauggcaugcacuaugcgcgagcccacugg

SEQ ID NO: 16343 - RNA, 36 nt, Artificial Sequence
  Description of Artificial Sequence:  Enzymatic Nucleic Acid
uugguugauggcaugcacuaugcgcgaucagcccac

SEQ ID NO: 16344 - RNA, 36 nt, Artificial Sequence
  Description of Artificial Sequence:  Enzymatic Nucleic Acid
uuuuuugauggcaugcacuaugcgcgauggacccug

SEQ ID NO: 16345 - RNA, 36 nt, Artificial Sequence
  Description of Artificial Sequence:  Enzymatic Nucleic Acid
aaaagugauggcaugcacuaugcgcgaacaaaaggu

SEQ ID NO: 16346 - RNA, 36 nt, Artificial Sequence
  Description of Artificial Sequence:  Enzymatic Nucleic Acid
cuucgugauggcaugcacuaugcgcgagggauucug

SEQ ID NO: 16347 - RNA, 36 nt, Artificial Sequence
  Description of Artificial Sequence:  Enzymatic Nucleic Acid
uacuuugauggcaugcacuaugcgcggcagggauuc

SEQ ID NO: 16348 - RNA, 36 nt, Artificial Sequence
  Description of Artificial Sequence:  Enzymatic Nucleic Acid
ggacuugauggcaugcacuaugcgcgaagggguauu

SEQ ID NO: 16349 - RNA, 36 nt, Artificial Sequence
  Description of Artificial Sequence:  Enzymatic Nucleic Acid
aucguugauggcaugcacuaugcgcgaguacaugcc

SEQ ID NO: 16350 - RNA, 36 nt, Artificial Sequence
  Description of Artificial Sequence:  Enzymatic Nucleic Acid
auaauugauggcaugcacuaugcgcggucaguacau

SEQ ID NO: 16351 - RNA, 36 nt, Artificial Sequence
  Description of Artificial Sequence:  Enzymatic Nucleic Acid
ucacuugauggcaugcacuaugcgcgacuuccauaa

SEQ ID NO: 16352 - RNA, 36 nt, Artificial Sequence
  Description of Artificial Sequence:  Enzymatic Nucleic Acid
ucuuuugauggcaugcacuaugcgcgacucacuucc

SEQ ID NO: 16353 - RNA, 36 nt, Artificial Sequence
  Description of Artificial Sequence:  Enzymatic Nucleic Acid
uuucuugauggcaugcacuaugcgcgaccaaucugg

SEQ ID NO: 16354 - RNA, 36 nt, Artificial Sequence
  Description of Artificial Sequence:  Enzymatic Nucleic Acid
gucagugauggcaugcacuaugcgcgguuugagugg

SEQ ID NO: 16355 - RNA, 36 nt, Artificial Sequence
  Description of Artificial Sequence:  Enzymatic Nucleic Acid
cauguugauggcaugcacuaugcgcgagcguuugag

SEQ ID NO: 16356 - RNA, 36 nt, Artificial Sequence
  Description of Artificial Sequence:  Enzymatic Nucleic Acid
aauggugauggcaugcacuaugcgcgauagaccgua

SEQ ID NO: 16357 - RNA, 36 nt, Artificial Sequence
  Description of Artificial Sequence:  Enzymatic Nucleic Acid
ugaugugauggcaugcacuaugcgcggggggaggaa

SEQ ID NO: 16358 - RNA, 36 nt, Artificial Sequence
  Description of Artificial Sequence:  Enzymatic Nucleic Acid
uggcgugauggcaugcacuaugcgcgacucuuccuc

SEQ ID NO: 16359 - RNA, 36 nt, Artificial Sequence
  Description of Artificial Sequence:  Enzymatic Nucleic Acid
guuggugauggcaugcacuaugcgcggcacucuucc

SEQ ID NO: 16360 - RNA, 36 nt, Artificial Sequence
  Description of Artificial Sequence:  Enzymatic Nucleic Acid
gggcuugauggcaugcacuaugcgcgguuggcgcac

SEQ ID NO: 16361 - RNA, 36 nt, Artificial Sequence
  Description of Artificial Sequence:  Enzymatic Nucleic Acid
uuuguugauggcaugcacuaugcgcgacugagacag

SEQ ID NO: 16362 - RNA, 36 nt, Artificial Sequence
  Description of Artificial Sequence:  Enzymatic Nucleic Acid
uucuuugauggcaugcacuaugcgcgacaaggguau

SEQ ID NO: 16363 - RNA, 36 nt, Artificial Sequence
  Description of Artificial Sequence:  Enzymatic Nucleic Acid
aacuuugauggcaugcacuaugcgcgaauuuuauuu

SEQ ID NO: 16364 - RNA, 36 nt, Artificial Sequence
  Description of Artificial Sequence:  Enzymatic Nucleic Acid
uagagugauggcaugcacuaugcgcgaaauugauuu

SEQ ID NO: 16365 - RNA, 36 nt, Artificial Sequence
  Description of Artificial Sequence:  Enzymatic Nucleic Acid
uccuuugauggcaugcacuaugcgcgaauuagagca

SEQ ID NO: 16366 - RNA, 36 nt, Artificial Sequence
  Description of Artificial Sequence:  Enzymatic Nucleic Acid
cgcuuugauggcaugcacuaugcgcgacauuuguac

SEQ ID NO: 16367 - RNA, 36 nt, Artificial Sequence
  Description of Artificial Sequence:  Enzymatic Nucleic Acid
gagauugauggcaugcacuaugcgcgacccucucuc

SEQ ID NO: 16368 - RNA, 36 nt, Artificial Sequence
  Description of Artificial Sequence:  Enzymatic Nucleic Acid
cugguugauggcaugcacuaugcgcgacguggaagg

SEQ ID NO: 16369 - RNA, 36 nt, Artificial Sequence
  Description of Artificial Sequence:  Enzymatic Nucleic Acid
aauuuugauggcaugcacuaugcgcgaggaccccug

SEQ ID NO: 16370 - RNA, 36 nt, Artificial Sequence
  Description of Artificial Sequence:  Enzymatic Nucleic Acid
gguugugauggcaugcacuaugcgcgaaaguaauuu

SEQ ID NO: 16371 - RNA, 36 nt, Artificial Sequence
  Description of Artificial Sequence:  Enzymatic Nucleic Acid
cauguugauggcaugcacuaugcgcgagguugcaaa

SEQ ID NO: 16372 - RNA, 36 nt, Artificial Sequence
  Description of Artificial Sequence:  Enzymatic Nucleic Acid
ggcugugauggcaugcacuaugcgcgaugucagguu

SEQ ID NO: 16373 - RNA, 36 nt, Artificial Sequence
  Description of Artificial Sequence:  Enzymatic Nucleic Acid
cugcuugauggcaugcacuaugcgcgagugggcugc

SEQ ID NO: 16374 - RNA, 36 nt, Artificial Sequence
  Description of Artificial Sequence:  Enzymatic Nucleic Acid
cagugugauggcaugcacuaugcgcgaccacaaaga

SEQ ID NO: 16375 - RNA, 36 nt, Artificial Sequence
  Description of Artificial Sequence:  Enzymatic Nucleic Acid
gucugugauggcaugcacuaugcgcgagugcaccac

SEQ ID NO: 16376 - RNA, 36 nt, Artificial Sequence
  Description of Artificial Sequence:  Enzymatic Nucleic Acid
guucuugauggcaugcacuaugcgcgaaacguagau

SEQ ID NO: 16377 - RNA, 36 nt, Artificial Sequence
  Description of Artificial Sequence:  Enzymatic Nucleic Acid
auuggugauggcaugcacuaugcgcgagaggcugug

SEQ ID NO: 16378 - RNA, 36 nt, Artificial Sequence
  Description of Artificial Sequence:  Enzymatic Nucleic Acid
gugggugauggcaugcacuaugcgcgaacucuccca

SEQ ID NO: 16379 - RNA, 36 nt, Artificial Sequence
  Description of Artificial Sequence:  Enzymatic Nucleic Acid
ucuugugauggcaugcacuaugcgcgaaacaggugu

SEQ ID NO: 16380 - RNA, 36 nt, Artificial Sequence
  Description of Artificial Sequence:  Enzymatic Nucleic Acid
gcauuugauggcaugcacuaugcgcgaauuuccaaa

SEQ ID NO: 16381 - RNA, 36 nt, Artificial Sequence
  Description of Artificial Sequence:  Enzymatic Nucleic Acid
gguggugauggcaugcacuaugcgcgauucaauuuc

SEQ ID NO: 16382 - RNA, 36 nt, Artificial Sequence
  Description of Artificial Sequence:  Enzymatic Nucleic Acid
aauguugauggcaugcacuaugcgcgauuugugcua

SEQ ID NO: 16383 - RNA, 36 nt, Artificial Sequence
  Description of Artificial Sequence:  Enzymatic Nucleic Acid
augauugauggcaugcacuaugcgcgaaaaugucau

SEQ ID NO: 16384 - RNA, 36 nt, Artificial Sequence
  Description of Artificial Sequence:  Enzymatic Nucleic Acid
ggaugugauggcaugcacuaugcgcgauucuuaagc

SEQ ID NO: 16385 - RNA, 36 nt, Artificial Sequence
  Description of Artificial Sequence:  Enzymatic Nucleic Acid
uccugugauggcaugcacuaugcgcgaaggaugcau

SEQ ID NO: 16386 - RNA, 36 nt, Artificial Sequence
  Description of Artificial Sequence:  Enzymatic Nucleic Acid
caaggugauggcaugcacuaugcgcgagacauaguc

SEQ ID NO: 16387 - RNA, 36 nt, Artificial Sequence
  Description of Artificial Sequence:  Enzymatic Nucleic Acid
uugagugauggcaugcacuaugcgcgaaggcagaca

SEQ ID NO: 16388 - RNA, 36 nt, Artificial Sequence
  Description of Artificial Sequence:  Enzymatic Nucleic Acid
ccacgugauggcaugcacuaugcgcgaaugucuuuu

SEQ ID NO: 16389 - RNA, 36 nt, Artificial Sequence
  Description of Artificial Sequence:  Enzymatic Nucleic Acid
gugauugauggcaugcacuaugcgcggugggugcca

SEQ ID NO: 16390 - RNA, 36 nt, Artificial Sequence
  Description of Artificial Sequence:  Enzymatic Nucleic Acid
cuuguugauggcaugcacuaugcgcggucugauucu

SEQ ID NO: 16391 - RNA, 36 nt, Artificial Sequence
  Description of Artificial Sequence:  Enzymatic Nucleic Acid
gacuuugauggcaugcacuaugcgcggaugcuuucc

SEQ ID NO: 16392 - RNA, 36 nt, Artificial Sequence
  Description of Artificial Sequence:  Enzymatic Nucleic Acid
ccgugugauggcaugcacuaugcgcgaugagacuuc

SEQ ID NO: 16393 - RNA, 36 nt, Artificial Sequence
  Description of Artificial Sequence:  Enzymatic Nucleic Acid
ggucuugauggcaugcacuaugcgcgauuaucuuua

SEQ ID NO: 16394 - RNA, 36 nt, Artificial Sequence
  Description of Artificial Sequence:  Enzymatic Nucleic Acid
uccuuugauggcaugcacuaugcgcgaauacaaugc

SEQ ID NO: 16395 - RNA, 36 nt, Artificial Sequence
  Description of Artificial Sequence:  Enzymatic Nucleic Acid
cucugugauggcaugcacuaugcgcgggauagugag

SEQ ID NO: 16396 - RNA, 36 nt, Artificial Sequence
  Description of Artificial Sequence:  Enzymatic Nucleic Acid
uuccuugauggcaugcacuaugcgcgacucugcgga

SEQ ID NO: 16397 - RNA, 36 nt, Artificial Sequence
  Description of Artificial Sequence:  Enzymatic Nucleic Acid
gccuuugauggcaugcacuaugcgcgguccuccuuc

SEQ ID NO: 16398 - RNA, 36 nt, Artificial Sequence
  Description of Artificial Sequence:  Enzymatic Nucleic Acid
ccuggugauggcaugcacuaugcgcgagguguagag

SEQ ID NO: 16399 - RNA, 36 nt, Artificial Sequence
  Description of Artificial Sequence:  Enzymatic Nucleic Acid
cacugugauggcaugcacuaugcgcgaugccuggca

SEQ ID NO: 16400 - RNA, 36 nt, Artificial Sequence
  Description of Artificial Sequence:  Enzymatic Nucleic Acid
uuuugugauggcaugcacuaugcgcgacagccaaga

SEQ ID NO: 16401 - RNA, 36 nt, Artificial Sequence
  Description of Artificial Sequence:  Enzymatic Nucleic Acid
cugggugauggcaugcacuaugcgcgaccuucuauu

SEQ ID NO: 16402 - RNA, 36 nt, Artificial Sequence
  Description of Artificial Sequence:  Enzymatic Nucleic Acid
aaguuugauggcaugcacuaugcgcggucuuuuccu

SEQ ID NO: 16403 - RNA, 36 nt, Artificial Sequence
  Description of Artificial Sequence:  Enzymatic Nucleic Acid
accguugauggcaugcacuaugcgcggugccuacua

SEQ ID NO: 16404 - RNA, 36 nt, Artificial Sequence
  Description of Artificial Sequence:  Enzymatic Nucleic Acid
gcaauugauggcaugcacuaugcgcgaccgucgugc

SEQ ID NO: 16405 - RNA, 36 nt, Artificial Sequence
  Description of Artificial Sequence:  Enzymatic Nucleic Acid
cauggugauggcaugcacuaugcgcgaaucaccguc

SEQ ID NO: 16406 - RNA, 36 nt, Artificial Sequence
  Description of Artificial Sequence:  Enzymatic Nucleic Acid
gucuuugauggcaugcacuaugcgcgaguuccccuc

SEQ ID NO: 16407 - RNA, 36 nt, Artificial Sequence
  Description of Artificial Sequence:  Enzymatic Nucleic Acid
gaguuugauggcaugcacuaugcgcgaucuggaucc

SEQ ID NO: 16408 - RNA, 36 nt, Artificial Sequence
  Description of Artificial Sequence:  Enzymatic Nucleic Acid
auguuugauggcaugcacuaugcgcgauccaauggg

SEQ ID NO: 16409 - RNA, 36 nt, Artificial Sequence
  Description of Artificial Sequence:  Enzymatic Nucleic Acid
ucguuugauggcaugcacuaugcgcgacaauguuca

SEQ ID NO: 16410 - RNA, 36 nt, Artificial Sequence
  Description of Artificial Sequence:  Enzymatic Nucleic Acid
gcaguugauggcaugcacuaugcgcgguucacaaug

SEQ ID NO: 16411 - RNA, 36 nt, Artificial Sequence
  Description of Artificial Sequence:  Enzymatic Nucleic Acid
uaaggugauggcaugcacuaugcgcgagucguucac

SEQ ID NO: 16412 - RNA, 36 nt, Artificial Sequence
  Description of Artificial Sequence:  Enzymatic Nucleic Acid
ggcauugauggcaugcacuaugcgcgauaaggcagu

SEQ ID NO: 16413 - RNA, 36 nt, Artificial Sequence
  Description of Artificial Sequence:  Enzymatic Nucleic Acid
gcuggugauggcaugcacuaugcgcgaucauaaggc

SEQ ID NO: 16414 - RNA, 36 nt, Artificial Sequence
  Description of Artificial Sequence:  Enzymatic Nucleic Acid
agguuugauggcaugcacuaugcgcgagccggucuc

SEQ ID NO: 16415 - RNA, 36 nt, Artificial Sequence
  Description of Artificial Sequence:  Enzymatic Nucleic Acid
aaaggugauggcaugcacuaugcgcgaccacggcca

SEQ ID NO: 16416 - RNA, 36 nt, Artificial Sequence
  Description of Artificial Sequence:  Enzymatic Nucleic Acid
ugcuuugauggcaugcacuaugcgcgaaucucuugg

SEQ ID NO: 16417 - RNA, 36 nt, Artificial Sequence
  Description of Artificial Sequence:  Enzymatic Nucleic Acid
aaaggugauggcaugcacuaugcgcgaucugcuuca

SEQ ID NO: 16418 - RNA, 36 nt, Artificial Sequence
  Description of Artificial Sequence:  Enzymatic Nucleic Acid
cuuguugauggcaugcacuaugcgcgaauuccaaag

SEQ ID NO: 16419 - RNA, 36 nt, Artificial Sequence
  Description of Artificial Sequence:  Enzymatic Nucleic Acid
uccugugauggcaugcacuaugcgcgaaguugcugu

SEQ ID NO: 16420 - RNA, 36 nt, Artificial Sequence
  Description of Artificial Sequence:  Enzymatic Nucleic Acid
ucuuuugauggcaugcacuaugcgcgaacauuuuga

SEQ ID NO: 16421 - RNA, 36 nt, Artificial Sequence
  Description of Artificial Sequence:  Enzymatic Nucleic Acid
augcuugauggcaugcacuaugcgcgacuguguguu

SEQ ID NO: 16422 - RNA, 36 nt, Artificial Sequence
  Description of Artificial Sequence:  Enzymatic Nucleic Acid
gagcuugauggcaugcacuaugcgcggaugcucacu

SEQ ID NO: 16423 - RNA, 36 nt, Artificial Sequence
  Description of Artificial Sequence:  Enzymatic Nucleic Acid
gaguuugauggcaugcacuaugcgcgagacaugaga

SEQ ID NO: 16424 - RNA, 36 nt, Artificial Sequence
  Description of Artificial Sequence:  Enzymatic Nucleic Acid
acaggugauggcaugcacuaugcgcgaccuagaagg

SEQ ID NO: 16425 - RNA, 36 nt, Artificial Sequence
  Description of Artificial Sequence:  Enzymatic Nucleic Acid
acaauugauggcaugcacuaugcgcgaccaugagug

SEQ ID NO: 16426 - RNA, 36 nt, Artificial Sequence
  Description of Artificial Sequence:  Enzymatic Nucleic Acid
auuugugauggcaugcacuaugcgcgagaauuccac

SEQ ID NO: 16427 - RNA, 36 nt, Artificial Sequence
  Description of Artificial Sequence:  Enzymatic Nucleic Acid
cuccuugauggcaugcacuaugcgcgagguaagugg

SEQ ID NO: 16428 - RNA, 36 nt, Artificial Sequence
  Description of Artificial Sequence:  Enzymatic Nucleic Acid
aaauuugauggcaugcacuaugcgcgauuucucuug

SEQ ID NO: 16429 - RNA, 36 nt, Artificial Sequence
  Description of Artificial Sequence:  Enzymatic Nucleic Acid
ggaauugauggcaugcacuaugcgcggugccccuuu

SEQ ID NO: 16430 - RNA, 36 nt, Artificial Sequence
  Description of Artificial Sequence:  Enzymatic Nucleic Acid
cguuuugauggcaugcacuaugcgcgagauccacag

SEQ ID NO: 16431 - RNA, 36 nt, Artificial Sequence
  Description of Artificial Sequence:  Enzymatic Nucleic Acid
ccaagugauggcaugcacuaugcgcggccguuucag

SEQ ID NO: 16432 - RNA, 36 nt, Artificial Sequence
  Description of Artificial Sequence:  Enzymatic Nucleic Acid
uacauugauggcaugcacuaugcgcgacugagggac

SEQ ID NO: 16433 - RNA, 36 nt, Artificial Sequence
  Description of Artificial Sequence:  Enzymatic Nucleic Acid
aucuuugauggcaugcacuaugcgcgaggagcuucc

SEQ ID NO: 16434 - RNA, 36 nt, Artificial Sequence
  Description of Artificial Sequence:  Enzymatic Nucleic Acid
aagguugauggcaugcacuaugcgcgaggaaguccu

SEQ ID NO: 16435 - RNA, 36 nt, Artificial Sequence
  Description of Artificial Sequence:  Enzymatic Nucleic Acid
uuucgugauggcaugcacuaugcgcggaugccaaga

SEQ ID NO: 16436 - RNA, 36 nt, Artificial Sequence
  Description of Artificial Sequence:  Enzymatic Nucleic Acid
acuuuugauggcaugcacuaugcgcggcgaugccaa

SEQ ID NO: 16437 - RNA, 36 nt, Artificial Sequence
  Description of Artificial Sequence:  Enzymatic Nucleic Acid
uauuuugauggcaugcacuaugcgcggugccgccag

SEQ ID NO: 16438 - RNA, 36 nt, Artificial Sequence
  Description of Artificial Sequence:  Enzymatic Nucleic Acid
aaaguugauggcaugcacuaugcgcgacagauuuua

SEQ ID NO: 16439 - RNA, 36 nt, Artificial Sequence
  Description of Artificial Sequence:  Enzymatic Nucleic Acid
gcgagugauggcaugcacuaugcgcgaucuccuuuu

SEQ ID NO: 16440 - RNA, 36 nt, Artificial Sequence
  Description of Artificial Sequence:  Enzymatic Nucleic Acid
ggaggugauggcaugcacuaugcgcggagcaucucc

SEQ ID NO: 16441 - RNA, 36 nt, Artificial Sequence
  Description of Artificial Sequence:  Enzymatic Nucleic Acid
cauuuugauggcaugcacuaugcgcgaaagggaggc

SEQ ID NO: 16442 - RNA, 36 nt, Artificial Sequence
  Description of Artificial Sequence:  Enzymatic Nucleic Acid
ucuguugauggcaugcacuaugcgcgaaaaauuguu

SEQ ID NO: 16443 - RNA, 36 nt, Artificial Sequence
  Description of Artificial Sequence:  Enzymatic Nucleic Acid
gacguugauggcaugcacuaugcgcgacucuggauu

SEQ ID NO: 16444 - RNA, 36 nt, Artificial Sequence
  Description of Artificial Sequence:  Enzymatic Nucleic Acid
cacagugauggcaugcacuaugcgcgaaaacaccaa

SEQ ID NO: 16445 - RNA, 36 nt, Artificial Sequence
  Description of Artificial Sequence:  Enzymatic Nucleic Acid
agaagugauggcaugcacuaugcgcgaccuaaggaa

SEQ ID NO: 16446 - RNA, 36 nt, Artificial Sequence
  Description of Artificial Sequence:  Enzymatic Nucleic Acid
uucauugauggcaugcacuaugcgcgaaucuuuacc

SEQ ID NO: 16447 - RNA, 36 nt, Artificial Sequence
  Description of Artificial Sequence:  Enzymatic Nucleic Acid
uucuuugauggcaugcacuaugcgcgaucaaucuuu

SEQ ID NO: 16448 - RNA, 36 nt, Artificial Sequence
  Description of Artificial Sequence:  Enzymatic Nucleic Acid
ucaauugauggcaugcacuaugcgcggccuacaaaa

SEQ ID NO: 16449 - RNA, 36 nt, Artificial Sequence
  Description of Artificial Sequence:  Enzymatic Nucleic Acid
ucuuuugauggcaugcacuaugcgcgaaucgccuac

SEQ ID NO: 16450 - RNA, 36 nt, Artificial Sequence
  Description of Artificial Sequence:  Enzymatic Nucleic Acid
gcccuugauggcaugcacuaugcgcgauucuaguuc

SEQ ID NO: 16451 - RNA, 36 nt, Artificial Sequence
  Description of Artificial Sequence:  Enzymatic Nucleic Acid
auaauugauggcaugcacuaugcgcgaggggcccuc

SEQ ID NO: 16452 - RNA, 36 nt, Artificial Sequence
  Description of Artificial Sequence:  Enzymatic Nucleic Acid
uccagugauggcaugcacuaugcgcgauggucuggu

SEQ ID NO: 16453 - RNA, 36 nt, Artificial Sequence
  Description of Artificial Sequence:  Enzymatic Nucleic Acid
gcuugugauggcaugcacuaugcgcgaagagauuuc

SEQ ID NO: 16454 - RNA, 36 nt, Artificial Sequence
  Description of Artificial Sequence:  Enzymatic Nucleic Acid
cugagugauggcaugcacuaugcgcgauuagcuugc

SEQ ID NO: 16455 - RNA, 36 nt, Artificial Sequence
  Description of Artificial Sequence:  Enzymatic Nucleic Acid
gauauugauggcaugcacuaugcgcgggaagaacaa

SEQ ID NO: 16456 - RNA, 36 nt, Artificial Sequence
  Description of Artificial Sequence:  Enzymatic Nucleic Acid
augcuugauggcaugcacuaugcgcgaaagucucug

SEQ ID NO: 16457 - RNA, 36 nt, Artificial Sequence
  Description of Artificial Sequence:  Enzymatic Nucleic Acid
guaggugauggcaugcacuaugcgcgagagagaguc

SEQ ID NO: 16458 - RNA, 36 nt, Artificial Sequence
  Description of Artificial Sequence:  Enzymatic Nucleic Acid
gggguugauggcaugcacuaugcgcgacauacuucc

SEQ ID NO: 16459 - RNA, 36 nt, Artificial Sequence
  Description of Artificial Sequence:  Enzymatic Nucleic Acid
guuguugauggcaugcacuaugcgcgauaauggaau

SEQ ID NO: 16460 - RNA, 36 nt, Artificial Sequence
  Description of Artificial Sequence:  Enzymatic Nucleic Acid
uucugugauggcaugcacuaugcgcgagauacugac

SEQ ID NO: 16461 - RNA, 36 nt, Artificial Sequence
  Description of Artificial Sequence:  Enzymatic Nucleic Acid
ucuuuugauggcaugcacuaugcgcggcuuacuguu

SEQ ID NO: 16462 - RNA, 36 nt, Artificial Sequence
  Description of Artificial Sequence:  Enzymatic Nucleic Acid
acacuugauggcaugcacuaugcgcgacaggccggc

SEQ ID NO: 16463 - RNA, 36 nt, Artificial Sequence
  Description of Artificial Sequence:  Enzymatic Nucleic Acid
aucuuugauggcaugcacuaugcgcgaaauguuuuu

SEQ ID NO: 16464 - RNA, 36 nt, Artificial Sequence
  Description of Artificial Sequence:  Enzymatic Nucleic Acid
guuguugauggcaugcacuaugcgcgaucugggauu

SEQ ID NO: 16465 - RNA, 36 nt, Artificial Sequence
  Description of Artificial Sequence:  Enzymatic Nucleic Acid
ugaggugauggcaugcacuaugcgcgaagaaccaua

SEQ ID NO: 16466 - RNA, 36 nt, Artificial Sequence
  Description of Artificial Sequence:  Enzymatic Nucleic Acid
guuuuugauggcaugcacuaugcgcgagcucuucug

SEQ ID NO: 16467 - RNA, 36 nt, Artificial Sequence
  Description of Artificial Sequence:  Enzymatic Nucleic Acid
cugggugauggcaugcacuaugcgcgaccauuccac

SEQ ID NO: 16468 - RNA, 36 nt, Artificial Sequence
  Description of Artificial Sequence:  Enzymatic Nucleic Acid
gccuuugauggcaugcacuaugcgcgagaugccaca

SEQ ID NO: 16469 - RNA, 36 nt, Artificial Sequence
  Description of Artificial Sequence:  Enzymatic Nucleic Acid
gucauugauggcaugcacuaugcgcgggagugauau

SEQ ID NO: 16470 - RNA, 36 nt, Artificial Sequence
  Description of Artificial Sequence:  Enzymatic Nucleic Acid
uguguugauggcaugcacuaugcgcgaucggaguga

SEQ ID NO: 16471 - RNA, 36 nt, Artificial Sequence
  Description of Artificial Sequence:  Enzymatic Nucleic Acid
uuccuugauggcaugcacuaugcgcgacuggaguac

SEQ ID NO: 16472 - RNA, 36 nt, Artificial Sequence
  Description of Artificial Sequence:  Enzymatic Nucleic Acid
ucuauugauggcaugcacuaugcgcgagcuuuaaaa

SEQ ID NO: 16473 - RNA, 36 nt, Artificial Sequence
  Description of Artificial Sequence:  Enzymatic Nucleic Acid
guuugugauggcaugcacuaugcgcgacuccaaucu

SEQ ID NO: 16474 - RNA, 36 nt, Artificial Sequence
  Description of Artificial Sequence:  Enzymatic Nucleic Acid
cguguugauggcaugcacuaugcgcgaggcuggaga

SEQ ID NO: 16475 - RNA, 36 nt, Artificial Sequence
  Description of Artificial Sequence:  Enzymatic Nucleic Acid
gagcuugauggcaugcacuaugcgcgaguguggucc

SEQ ID NO: 16476 - RNA, 36 nt, Artificial Sequence
  Description of Artificial Sequence:  Enzymatic Nucleic Acid
ccucuugauggcaugcacuaugcgcgaugugauguc

SEQ ID NO: 16477 - RNA, 36 nt, Artificial Sequence
  Description of Artificial Sequence:  Enzymatic Nucleic Acid
cugagugauggcaugcacuaugcgcgagaccucuca

SEQ ID NO: 16478 - RNA, 36 nt, Artificial Sequence
  Description of Artificial Sequence:  Enzymatic Nucleic Acid
cacuuugauggcaugcacuaugcgcgaaaaucugag

SEQ ID NO: 16479 - RNA, 36 nt, Artificial Sequence
  Description of Artificial Sequence:  Enzymatic Nucleic Acid
aaaugugauggcaugcacuaugcgcgggcuacuucc

SEQ ID NO: 16480 - RNA, 36 nt, Artificial Sequence
  Description of Artificial Sequence:  Enzymatic Nucleic Acid
aaaauugauggcaugcacuaugcgcgaaaugcggcu

SEQ ID NO: 16481 - RNA, 36 nt, Artificial Sequence
  Description of Artificial Sequence:  Enzymatic Nucleic Acid
guuguugauggcaugcacuaugcgcggaaaugaaaa

SEQ ID NO: 16482 - RNA, 36 nt, Artificial Sequence
  Description of Artificial Sequence:  Enzymatic Nucleic Acid
cccugugauggcaugcacuaugcgcgaguccgaggu

SEQ ID NO: 16483 - DNA, 31 bp, Artificial Sequence
  Description of Artificial Sequence:  Enzymatic Nucleic Acid
gggaggagggctagctacaacgacgagagga

SEQ ID NO: 16484 - DNA, 31 bp, Artificial Sequence
  Description of Artificial Sequence:  Enzymatic Nucleic Acid
cgccgctgggctagctacaacgacggggagg

SEQ ID NO: 16485 - DNA, 31 bp, Artificial Sequence
  Description of Artificial Sequence:  Enzymatic Nucleic Acid
cgccgccgggctagctacaacgatgccgggg

SEQ ID NO: 16486 - DNA, 31 bp, Artificial Sequence
  Description of Artificial Sequence:  Enzymatic Nucleic Acid
agccgccgggctagctacaacgacgctgccg

SEQ ID NO: 16487 - DNA, 31 bp, Artificial Sequence
  Description of Artificial Sequence:  Enzymatic Nucleic Acid
ccgagccgggctagctacaacgacgccgctg

SEQ ID NO: 16488 - DNA, 31 bp, Artificial Sequence
  Description of Artificial Sequence:  Enzymatic Nucleic Acid
gctccgagggctagctacaacgacgccgccg

SEQ ID NO: 16489 - DNA, 31 bp, Artificial Sequence
  Description of Artificial Sequence:  Enzymatic Nucleic Acid
ggagcccgggctagctacaacgatccgagcc

SEQ ID NO: 16490 - DNA, 31 bp, Artificial Sequence
  Description of Artificial Sequence:  Enzymatic Nucleic Acid
ccccggagggctagctacaacgaccgctccg

SEQ ID NO: 16491 - DNA, 31 bp, Artificial Sequence
  Description of Artificial Sequence:  Enzymatic Nucleic Acid
cacccgagggctagctacaacgacccggagc

SEQ ID NO: 16492 - DNA, 31 bp, Artificial Sequence
  Description of Artificial Sequence:  Enzymatic Nucleic Acid
ccgctgcaggctagctacaacgaccgagccc

SEQ ID NO: 16493 - DNA, 31 bp, Artificial Sequence
  Description of Artificial Sequence:  Enzymatic Nucleic Acid
ggccgctgggctagctacaacgaacccgagc

SEQ ID NO: 16494 - DNA, 31 bp, Artificial Sequence
  Description of Artificial Sequence:  Enzymatic Nucleic Acid
gctggccgggctagctacaacgatgcacccg

SEQ ID NO: 16495 - DNA, 31 bp, Artificial Sequence
  Description of Artificial Sequence:  Enzymatic Nucleic Acid
cccgctggggctagctacaacgacgctgcac

SEQ ID NO: 16496 - DNA, 31 bp, Artificial Sequence
  Description of Artificial Sequence:  Enzymatic Nucleic Acid
caggcccgggctagctacaacgatggccgct

SEQ ID NO: 16497 - DNA, 31 bp, Artificial Sequence
  Description of Artificial Sequence:  Enzymatic Nucleic Acid
ccgccaggggctagctacaacgaccgctggc

SEQ ID NO: 16498 - DNA, 31 bp, Artificial Sequence
  Description of Artificial Sequence:  Enzymatic Nucleic Acid
cctcgccgggctagctacaacgacaggcccg

SEQ ID NO: 16499 - DNA, 31 bp, Artificial Sequence
  Description of Artificial Sequence:  Enzymatic Nucleic Acid
aatcctcgggctagctacaacgacgccaggc

SEQ ID NO: 16500 - DNA, 31 bp, Artificial Sequence
  Description of Artificial Sequence:  Enzymatic Nucleic Acid
ccgggtaaggctagctacaacgacctcgccg

SEQ ID NO: 16501 - DNA, 31 bp, Artificial Sequence
  Description of Artificial Sequence:  Enzymatic Nucleic Acid
tccccgggggctagctacaacgaaatcctcg

SEQ ID NO: 16502 - DNA, 31 bp, Artificial Sequence
  Description of Artificial Sequence:  Enzymatic Nucleic Acid
gacaaccaggctagctacaacgattccccgg

SEQ ID NO: 16503 - DNA, 31 bp, Artificial Sequence
  Description of Artificial Sequence:  Enzymatic Nucleic Acid
ggagacaaggctagctacaacgacacttccc

SEQ ID NO: 16504 - DNA, 31 bp, Artificial Sequence
  Description of Artificial Sequence:  Enzymatic Nucleic Acid
ccaggagaggctagctacaacgaaaccactt

SEQ ID NO: 16505 - DNA, 31 bp, Artificial Sequence
  Description of Artificial Sequence:  Enzymatic Nucleic Acid
ggctccagggctagctacaacgacaggagac

SEQ ID NO: 16506 - DNA, 31 bp, Artificial Sequence
  Description of Artificial Sequence:  Enzymatic Nucleic Acid
tctcgcggggctagctacaacgatccagcca

SEQ ID NO: 16507 - DNA, 31 bp, Artificial Sequence
  Description of Artificial Sequence:  Enzymatic Nucleic Acid
ccgtctcgggctagctacaacgaggctccag

SEQ ID NO: 16508 - DNA, 31 bp, Artificial Sequence
  Description of Artificial Sequence:  Enzymatic Nucleic Acid
agcgcccgggctagctacaacgactcgcggc

SEQ ID NO: 16509 - DNA, 31 bp, Artificial Sequence
  Description of Artificial Sequence:  Enzymatic Nucleic Acid
cctgagcgggctagctacaacgaccgtctcg

SEQ ID NO: 16510 - DNA, 31 bp, Artificial Sequence
  Description of Artificial Sequence:  Enzymatic Nucleic Acid
gccctgagggctagctacaacgagcccgtct

SEQ ID NO: 16511 - DNA, 31 bp, Artificial Sequence
  Description of Artificial Sequence:  Enzymatic Nucleic Acid
gccccgcgggctagctacaacgacctgagcg

SEQ ID NO: 16512 - DNA, 31 bp, Artificial Sequence
  Description of Artificial Sequence:  Enzymatic Nucleic Acid
cggccccgggctagctacaacgagccctgag

SEQ ID NO: 16513 - DNA, 31 bp, Artificial Sequence
  Description of Artificial Sequence:  Enzymatic Nucleic Acid
gccgccggggctagctacaacgacccgcgcc

SEQ ID NO: 16514 - DNA, 31 bp, Artificial Sequence
  Description of Artificial Sequence:  Enzymatic Nucleic Acid
cgccgccgggctagctacaacgacggccccg

SEQ ID NO: 16515 - DNA, 31 bp, Artificial Sequence
  Description of Artificial Sequence:  Enzymatic Nucleic Acid
gttcgccgggctagctacaacgacgccggcc

SEQ ID NO: 16516 - DNA, 31 bp, Artificial Sequence
  Description of Artificial Sequence:  Enzymatic Nucleic Acid
ctcgttcgggctagctacaacgacgccgccg

SEQ ID NO: 16517 - DNA, 31 bp, Artificial Sequence
  Description of Artificial Sequence:  Enzymatic Nucleic Acid
tcctctcgggctagctacaacgatcgccgcc

SEQ ID NO: 16518 - DNA, 31 bp, Artificial Sequence
  Description of Artificial Sequence:  Enzymatic Nucleic Acid
agagtccgggctagctacaacgacctctcgt

SEQ ID NO: 16519 - DNA, 31 bp, Artificial Sequence
  Description of Artificial Sequence:  Enzymatic Nucleic Acid
cgccagagggctagctacaacgaccgtcctc

SEQ ID NO: 16520 - DNA, 31 bp, Artificial Sequence
  Description of Artificial Sequence:  Enzymatic Nucleic Acid
cccggccgggctagctacaacgacagagtcc

SEQ ID NO: 16521 - DNA, 31 bp, Artificial Sequence
  Description of Artificial Sequence:  Enzymatic Nucleic Acid
cgacccggggctagctacaacgacgccagag

SEQ ID NO: 16522 - DNA, 31 bp, Artificial Sequence
  Description of Artificial Sequence:  Enzymatic Nucleic Acid
gccaacgaggctagctacaacgaccggccgc

SEQ ID NO: 16523 - DNA, 31 bp, Artificial Sequence
  Description of Artificial Sequence:  Enzymatic Nucleic Acid
ccggccaaggctagctacaacgagacccggc

SEQ ID NO: 16524 - DNA, 31 bp, Artificial Sequence
  Description of Artificial Sequence:  Enzymatic Nucleic Acid
tcccccggggctagctacaacgacaacgacc

SEQ ID NO: 16525 - DNA, 31 bp, Artificial Sequence
  Description of Artificial Sequence:  Enzymatic Nucleic Acid
tgcccgcgggctagctacaacgatcccccgg

SEQ ID NO: 16526 - DNA, 31 bp, Artificial Sequence
  Description of Artificial Sequence:  Enzymatic Nucleic Acid
ggtgcccgggctagctacaacgagctccccc

SEQ ID NO: 16527 - DNA, 31 bp, Artificial Sequence
  Description of Artificial Sequence:  Enzymatic Nucleic Acid
gcccggtgggctagctacaacgaccgcgctc

SEQ ID NO: 16528 - DNA, 31 bp, Artificial Sequence
  Description of Artificial Sequence:  Enzymatic Nucleic Acid
tcgcccggggctagctacaacgagcccgcgc

SEQ ID NO: 16529 - DNA, 31 bp, Artificial Sequence
  Description of Artificial Sequence:  Enzymatic Nucleic Acid
cctgctcgggctagctacaacgaccggtgcc

SEQ ID NO: 16530 - DNA, 31 bp, Artificial Sequence
  Description of Artificial Sequence:  Enzymatic Nucleic Acid
gcggcctgggctagctacaacgatcgcccgg

SEQ ID NO: 16531 - DNA, 31 bp, Artificial Sequence
  Description of Artificial Sequence:  Enzymatic Nucleic Acid
cgacgcggggctagctacaacgactgctcgc

SEQ ID NO: 16532 - DNA, 31 bp, Artificial Sequence
  Description of Artificial Sequence:  Enzymatic Nucleic Acid
gcgcgacgggctagctacaacgaggcctgct

SEQ ID NO: 16533 - DNA, 31 bp, Artificial Sequence
  Description of Artificial Sequence:  Enzymatic Nucleic Acid
gagcgcgaggctagctacaacgagcggcctg

SEQ ID NO: 16534 - DNA, 31 bp, Artificial Sequence
  Description of Artificial Sequence:  Enzymatic Nucleic Acid
ggtgagcgggctagctacaacgagacgcggc

SEQ ID NO: 16535 - DNA, 31 bp, Artificial Sequence
  Description of Artificial Sequence:  Enzymatic Nucleic Acid
atggtgagggctagctacaacgagcgacgcg

SEQ ID NO: 16536 - DNA, 31 bp, Artificial Sequence
  Description of Artificial Sequence:  Enzymatic Nucleic Acid
gaccatggggctagctacaacgagagcgcga

SEQ ID NO: 16537 - DNA, 31 bp, Artificial Sequence
  Description of Artificial Sequence:  Enzymatic Nucleic Acid
gctgaccaggctagctacaacgaggtgagcg

SEQ ID NO: 16538 - DNA, 31 bp, Artificial Sequence
  Description of Artificial Sequence:  Enzymatic Nucleic Acid
gtagctgaggctagctacaacgacatggtga

SEQ ID NO: 16539 - DNA, 31 bp, Artificial Sequence
  Description of Artificial Sequence:  Enzymatic Nucleic Acid
cccagtagggctagctacaacgatgaccatg

SEQ ID NO: 16540 - DNA, 31 bp, Artificial Sequence
  Description of Artificial Sequence:  Enzymatic Nucleic Acid
tgtcccagggctagctacaacgaagctgacc

SEQ ID NO: 16541 - DNA, 31 bp, Artificial Sequence
  Description of Artificial Sequence:  Enzymatic Nucleic Acid
ccccggtgggctagctacaacgacccagtag

SEQ ID NO: 16542 - DNA, 31 bp, Artificial Sequence
  Description of Artificial Sequence:  Enzymatic Nucleic Acid
gaccccggggctagctacaacgagtcccagt

SEQ ID NO: 16543 - DNA, 31 bp, Artificial Sequence
  Description of Artificial Sequence:  Enzymatic Nucleic Acid
cagcaggaggctagctacaacgacccggtgt

SEQ ID NO: 16544 - DNA, 31 bp, Artificial Sequence
  Description of Artificial Sequence:  Enzymatic Nucleic Acid
gcgcacagggctagctacaacgaaggacccc

SEQ ID NO: 16545 - DNA, 31 bp, Artificial Sequence
  Description of Artificial Sequence:  Enzymatic Nucleic Acid
agcgcgcaggctagctacaacgaagcaggac

SEQ ID NO: 16546 - DNA, 31 bp, Artificial Sequence
  Description of Artificial Sequence:  Enzymatic Nucleic Acid
gcagcgcgggctagctacaacgaacagcagg

SEQ ID NO: 16547 - DNA, 31 bp, Artificial Sequence
  Description of Artificial Sequence:  Enzymatic Nucleic Acid
gagcagcgggctagctacaacgagcacagca

SEQ ID NO: 16548 - DNA, 31 bp, Artificial Sequence
  Description of Artificial Sequence:  Enzymatic Nucleic Acid
ctgagcagggctagctacaacgagcgcacag

SEQ ID NO: 16549 - DNA, 31 bp, Artificial Sequence
  Description of Artificial Sequence:  Enzymatic Nucleic Acid
cagctgagggctagctacaacgaagcgcgca

SEQ ID NO: 16550 - DNA, 31 bp, Artificial Sequence
  Description of Artificial Sequence:  Enzymatic Nucleic Acid
gcagacagggctagctacaacgatgagcagc

SEQ ID NO: 16551 - DNA, 31 bp, Artificial Sequence
  Description of Artificial Sequence:  Enzymatic Nucleic Acid
gaagcagaggctagctacaacgaagctgagc

SEQ ID NO: 16552 - DNA, 31 bp, Artificial Sequence
  Description of Artificial Sequence:  Enzymatic Nucleic Acid
gtgagaagggctagctacaacgaagacagct

SEQ ID NO: 16553 - DNA, 31 bp, Artificial Sequence
  Description of Artificial Sequence:  Enzymatic Nucleic Acid
agatcctgggctagctacaacgagagaagca

SEQ ID NO: 16554 - DNA, 31 bp, Artificial Sequence
  Description of Artificial Sequence:  Enzymatic Nucleic Acid
gaactagaggctagctacaacgacctgtgag

SEQ ID NO: 16555 - DNA, 31 bp, Artificial Sequence
  Description of Artificial Sequence:  Enzymatic Nucleic Acid
aacctgaaggctagctacaacgatagatcct

SEQ ID NO: 16556 - DNA, 31 bp, Artificial Sequence
  Description of Artificial Sequence:  Enzymatic Nucleic Acid
attttgaaggctagctacaacgactgaacta

SEQ ID NO: 16557 - DNA, 31 bp, Artificial Sequence
  Description of Artificial Sequence:  Enzymatic Nucleic Acid
tcttttaaggctagctacaacgatttgaacc

SEQ ID NO: 16558 - DNA, 31 bp, Artificial Sequence
  Description of Artificial Sequence:  Enzymatic Nucleic Acid
gttcaggaggctagctacaacgacttttaat

SEQ ID NO: 16559 - DNA, 31 bp, Artificial Sequence
  Description of Artificial Sequence:  Enzymatic Nucleic Acid
aaactcagggctagctacaacgatcaggatc

SEQ ID NO: 16560 - DNA, 31 bp, Artificial Sequence
  Description of Artificial Sequence:  Enzymatic Nucleic Acid
cttttaaaggctagctacaacgatcagttca

SEQ ID NO: 16561 - DNA, 31 bp, Artificial Sequence
  Description of Artificial Sequence:  Enzymatic Nucleic Acid
gctgggtgggctagctacaacgacttttaaa

SEQ ID NO: 16562 - DNA, 31 bp, Artificial Sequence
  Description of Artificial Sequence:  Enzymatic Nucleic Acid
gtgctgggggctagctacaacgagcctttta

SEQ ID NO: 16563 - DNA, 31 bp, Artificial Sequence
  Description of Artificial Sequence:  Enzymatic Nucleic Acid
atgatgtgggctagctacaacgatgggtgcc

SEQ ID NO: 16564 - DNA, 31 bp, Artificial Sequence
  Description of Artificial Sequence:  Enzymatic Nucleic Acid
gcatgatgggctagctacaacgagctgggtg

SEQ ID NO: 16565 - DNA, 31 bp, Artificial Sequence
  Description of Artificial Sequence:  Enzymatic Nucleic Acid
ttgcatgaggctagctacaacgagtgctggg

SEQ ID NO: 16566 - DNA, 31 bp, Artificial Sequence
  Description of Artificial Sequence:  Enzymatic Nucleic Acid
tgcttgcaggctagctacaacgagatgtgct

SEQ ID NO: 16567 - DNA, 31 bp, Artificial Sequence
  Description of Artificial Sequence:  Enzymatic Nucleic Acid
cctgcttgggctagctacaacgaatgatgtg

SEQ ID NO: 16568 - DNA, 31 bp, Artificial Sequence
  Description of Artificial Sequence:  Enzymatic Nucleic Acid
ctggcctgggctagctacaacgattgcatga

SEQ ID NO: 16569 - DNA, 31 bp, Artificial Sequence
  Description of Artificial Sequence:  Enzymatic Nucleic Acid
gtgtctggggctagctacaacgactgcttgc

SEQ ID NO: 16570 - DNA, 31 bp, Artificial Sequence
  Description of Artificial Sequence:  Enzymatic Nucleic Acid
atgcagtgggctagctacaacgactggcctg

SEQ ID NO: 16571 - DNA, 31 bp, Artificial Sequence
  Description of Artificial Sequence:  Enzymatic Nucleic Acid
agatgcagggctagctacaacgagtctggcc

SEQ ID NO: 16572 - DNA, 31 bp, Artificial Sequence
  Description of Artificial Sequence:  Enzymatic Nucleic Acid
tggagatgggctagctacaacgaagtgtctg

SEQ ID NO: 16573 - DNA, 31 bp, Artificial Sequence
  Description of Artificial Sequence:  Enzymatic Nucleic Acid
attggagaggctagctacaacgagcagtgtc

SEQ ID NO: 16574 - DNA, 31 bp, Artificial Sequence
  Description of Artificial Sequence:  Enzymatic Nucleic Acid
cccctgcaggctagctacaacgatggagatg

SEQ ID NO: 16575 - DNA, 31 bp, Artificial Sequence
  Description of Artificial Sequence:  Enzymatic Nucleic Acid
cccccctgggctagctacaacgaattggaga

SEQ ID NO: 16576 - DNA, 31 bp, Artificial Sequence
  Description of Artificial Sequence:  Enzymatic Nucleic Acid
atgggctgggctagctacaacgattcccccc

SEQ ID NO: 16577 - DNA, 31 bp, Artificial Sequence
  Description of Artificial Sequence:  Enzymatic Nucleic Acid
tttatgggggctagctacaacgatgcttccc

SEQ ID NO: 16578 - DNA, 31 bp, Artificial Sequence
  Description of Artificial Sequence:  Enzymatic Nucleic Acid
accatttaggctagctacaacgagggctgct

SEQ ID NO: 16579 - DNA, 31 bp, Artificial Sequence
  Description of Artificial Sequence:  Enzymatic Nucleic Acid
aaagaccaggctagctacaacgattatgggc

SEQ ID NO: 16580 - DNA, 31 bp, Artificial Sequence
  Description of Artificial Sequence:  Enzymatic Nucleic Acid
ggcaaagaggctagctacaacgacatttatg

SEQ ID NO: 16581 - DNA, 31 bp, Artificial Sequence
  Description of Artificial Sequence:  Enzymatic Nucleic Acid
atttcaggggctagctacaacgaaaagacca

SEQ ID NO: 16582 - DNA, 31 bp, Artificial Sequence
  Description of Artificial Sequence:  Enzymatic Nucleic Acid
actcaccaggctagctacaacgattcaggca

SEQ ID NO: 16583 - DNA, 31 bp, Artificial Sequence
  Description of Artificial Sequence:  Enzymatic Nucleic Acid
cttactcaggctagctacaacgacatttcag

SEQ ID NO: 16584 - DNA, 31 bp, Artificial Sequence
  Description of Artificial Sequence:  Enzymatic Nucleic Acid
tttccttaggctagctacaacgatcaccatt

SEQ ID NO: 16585 - DNA, 31 bp, Artificial Sequence
  Description of Artificial Sequence:  Enzymatic Nucleic Acid
gcctttcgggctagctacaacgatttcctta

SEQ ID NO: 16586 - DNA, 31 bp, Artificial Sequence
  Description of Artificial Sequence:  Enzymatic Nucleic Acid
atgctcagggctagctacaacgactttcgct

SEQ ID NO: 16587 - DNA, 31 bp, Artificial Sequence
  Description of Artificial Sequence:  Enzymatic Nucleic Acid
tagttatgggctagctacaacgatcagcctt

SEQ ID NO: 16588 - DNA, 31 bp, Artificial Sequence
  Description of Artificial Sequence:  Enzymatic Nucleic Acid
tttagttaggctagctacaacgagctcagcc

SEQ ID NO: 16589 - DNA, 31 bp, Artificial Sequence
  Description of Artificial Sequence:  Enzymatic Nucleic Acid
agatttagggctagctacaacgatatgctca

SEQ ID NO: 16590 - DNA, 31 bp, Artificial Sequence
  Description of Artificial Sequence:  Enzymatic Nucleic Acid
caggcagaggctagctacaacgattagttat

SEQ ID NO: 16591 - DNA, 31 bp, Artificial Sequence
  Description of Artificial Sequence:  Enzymatic Nucleic Acid
tccacaggggctagctacaacgaagatttag

SEQ ID NO: 16592 - DNA, 31 bp, Artificial Sequence
  Description of Artificial Sequence:  Enzymatic Nucleic Acid
ttcttccaggctagctacaacgaaggcagat

SEQ ID NO: 16593 - DNA, 31 bp, Artificial Sequence
  Description of Artificial Sequence:  Enzymatic Nucleic Acid
gtttgccaggctagctacaacgattcttcca

SEQ ID NO: 16594 - DNA, 31 bp, Artificial Sequence
  Description of Artificial Sequence:  Enzymatic Nucleic Acid
attgtttgggctagctacaacgacatttctt

SEQ ID NO: 16595 - DNA, 31 bp, Artificial Sequence
  Description of Artificial Sequence:  Enzymatic Nucleic Acid
cagaattgggctagctacaacgattgccatt

SEQ ID NO: 16596 - DNA, 31 bp, Artificial Sequence
  Description of Artificial Sequence:  Enzymatic Nucleic Acid
ctgcagaaggctagctacaacgatgtttgcc

SEQ ID NO: 16597 - DNA, 31 bp, Artificial Sequence
  Description of Artificial Sequence:  Enzymatic Nucleic Acid
aagtactgggctagctacaacgaagaattgt

SEQ ID NO: 16598 - DNA, 31 bp, Artificial Sequence
  Description of Artificial Sequence:  Enzymatic Nucleic Acid
ttaaagtaggctagctacaacgatgcagaat

SEQ ID NO: 16599 - DNA, 31 bp, Artificial Sequence
  Description of Artificial Sequence:  Enzymatic Nucleic Acid
ggttaaagggctagctacaacgaactgcaga

SEQ ID NO: 16600 - DNA, 31 bp, Artificial Sequence
  Description of Artificial Sequence:  Enzymatic Nucleic Acid
gttcaaggggctagctacaacgataaagtac

SEQ ID NO: 16601 - DNA, 31 bp, Artificial Sequence
  Description of Artificial Sequence:  Enzymatic Nucleic Acid
gagctgtgggctagctacaacgatcaaggtt

SEQ ID NO: 16602 - DNA, 31 bp, Artificial Sequence
  Description of Artificial Sequence:  Enzymatic Nucleic Acid
ttgagctgggctagctacaacgagttcaagg

SEQ ID NO: 16603 - DNA, 31 bp, Artificial Sequence
  Description of Artificial Sequence:  Enzymatic Nucleic Acid
tgcttgagggctagctacaacgatgtgttca

SEQ ID NO: 16604 - DNA, 31 bp, Artificial Sequence
  Description of Artificial Sequence:  Enzymatic Nucleic Acid
gtggtttgggctagctacaacgattgagctg

SEQ ID NO: 16605 - DNA, 31 bp, Artificial Sequence
  Description of Artificial Sequence:  Enzymatic Nucleic Acid
cagtgtggggctagctacaacgattgcttga

SEQ ID NO: 16606 - DNA, 31 bp, Artificial Sequence
  Description of Artificial Sequence:  Enzymatic Nucleic Acid
agccagtgggctagctacaacgaggtttgct

SEQ ID NO: 16607 - DNA, 31 bp, Artificial Sequence
  Description of Artificial Sequence:  Enzymatic Nucleic Acid
gaagccagggctagctacaacgagtggtttg

SEQ ID NO: 16608 - DNA, 31 bp, Artificial Sequence
  Description of Artificial Sequence:  Enzymatic Nucleic Acid
tgtagaagggctagctacaacgacagtgtgg

SEQ ID NO: 16609 - DNA, 31 bp, Artificial Sequence
  Description of Artificial Sequence:  Enzymatic Nucleic Acid
tgcagctgggctagctacaacgaagaagcca

SEQ ID NO: 16610 - DNA, 31 bp, Artificial Sequence
  Description of Artificial Sequence:  Enzymatic Nucleic Acid
atttgcagggctagctacaacgatgtagaag

SEQ ID NO: 16611 - DNA, 31 bp, Artificial Sequence
  Description of Artificial Sequence:  Enzymatic Nucleic Acid
gatatttgggctagctacaacgaagctgtag

SEQ ID NO: 16612 - DNA, 31 bp, Artificial Sequence
  Description of Artificial Sequence:  Enzymatic Nucleic Acid
gctagataggctagctacaacgattgcagct

SEQ ID NO: 16613 - DNA, 31 bp, Artificial Sequence
  Description of Artificial Sequence:  Enzymatic Nucleic Acid
cagctagaggctagctacaacgaatttgcag

SEQ ID NO: 16614 - DNA, 31 bp, Artificial Sequence
  Description of Artificial Sequence:  Enzymatic Nucleic Acid
aggtacagggctagctacaacgatagatatt

SEQ ID NO: 16615 - DNA, 31 bp, Artificial Sequence
  Description of Artificial Sequence:  Enzymatic Nucleic Acid
agtaggtaggctagctacaacgaagctagat

SEQ ID NO: 16616 - DNA, 31 bp, Artificial Sequence
  Description of Artificial Sequence:  Enzymatic Nucleic Acid
gaagtaggggctagctacaacgaacagctag

SEQ ID NO: 16617 - DNA, 31 bp, Artificial Sequence
  Description of Artificial Sequence:  Enzymatic Nucleic Acid
ctttgaagggctagctacaacgaaggtacag

SEQ ID NO: 16618 - DNA, 31 bp, Artificial Sequence
  Description of Artificial Sequence:  Enzymatic Nucleic Acid
agattctgggctagctacaacgattccttct

SEQ ID NO: 16619 - DNA, 31 bp, Artificial Sequence
  Description of Artificial Sequence:  Enzymatic Nucleic Acid
attgcagaggctagctacaacgatctgtttc

SEQ ID NO: 16620 - DNA, 31 bp, Artificial Sequence
  Description of Artificial Sequence:  Enzymatic Nucleic Acid
atagattgggctagctacaacgaagattctg

SEQ ID NO: 16621 - DNA, 31 bp, Artificial Sequence
  Description of Artificial Sequence:  Enzymatic Nucleic Acid
tatatagaggctagctacaacgatgcagatt

SEQ ID NO: 16622 - DNA, 31 bp, Artificial Sequence
  Description of Artificial Sequence:  Enzymatic Nucleic Acid
taaatataggctagctacaacgaagattgca

SEQ ID NO: 16623 - DNA, 31 bp, Artificial Sequence
  Description of Artificial Sequence:  Enzymatic Nucleic Acid
aataaataggctagctacaacgaatagattg

SEQ ID NO: 16624 - DNA, 31 bp, Artificial Sequence
  Description of Artificial Sequence:  Enzymatic Nucleic Acid
ctaataaaggctagctacaacgaatatagat

SEQ ID NO: 16625 - DNA, 31 bp, Artificial Sequence
  Description of Artificial Sequence:  Enzymatic Nucleic Acid
atcactaaggctagctacaacgaaaatatat

SEQ ID NO: 16626 - DNA, 31 bp, Artificial Sequence
  Description of Artificial Sequence:  Enzymatic Nucleic Acid
ctgtatcaggctagctacaacgataataaat

SEQ ID NO: 16627 - DNA, 31 bp, Artificial Sequence
  Description of Artificial Sequence:  Enzymatic Nucleic Acid
tacctgtaggctagctacaacgacactaata

SEQ ID NO: 16628 - DNA, 31 bp, Artificial Sequence
  Description of Artificial Sequence:  Enzymatic Nucleic Acid
tctacctgggctagctacaacgaatcactaa

SEQ ID NO: 16629 - DNA, 31 bp, Artificial Sequence
  Description of Artificial Sequence:  Enzymatic Nucleic Acid
aaggtctaggctagctacaacgactgtatca

SEQ ID NO: 16630 - DNA, 31 bp, Artificial Sequence
  Description of Artificial Sequence:  Enzymatic Nucleic Acid
acgaaaggggctagctacaacgactacctgt

SEQ ID NO: 16631 - DNA, 31 bp, Artificial Sequence
  Description of Artificial Sequence:  Enzymatic Nucleic Acid
catctctaggctagctacaacgagaaaggtc

SEQ ID NO: 16632 - DNA, 31 bp, Artificial Sequence
  Description of Artificial Sequence:  Enzymatic Nucleic Acid
actgtacaggctagctacaacgactctacga

SEQ ID NO: 16633 - DNA, 31 bp, Artificial Sequence
  Description of Artificial Sequence:  Enzymatic Nucleic Acid
tcactgtaggctagctacaacgaatctctac

SEQ ID NO: 16634 - DNA, 31 bp, Artificial Sequence
  Description of Artificial Sequence:  Enzymatic Nucleic Acid
tttcactgggctagctacaacgaacatctct

SEQ ID NO: 16635 - DNA, 31 bp, Artificial Sequence
  Description of Artificial Sequence:  Enzymatic Nucleic Acid
ggatttcaggctagctacaacgatgtacatc

SEQ ID NO: 16636 - DNA, 31 bp, Artificial Sequence
  Description of Artificial Sequence:  Enzymatic Nucleic Acid
ttcggggaggctagctacaacgattcactgt

SEQ ID NO: 16637 - DNA, 31 bp, Artificial Sequence
  Description of Artificial Sequence:  Enzymatic Nucleic Acid
gtgtataaggctagctacaacgattcgggga

SEQ ID NO: 16638 - DNA, 31 bp, Artificial Sequence
  Description of Artificial Sequence:  Enzymatic Nucleic Acid
catgtgtaggctagctacaacgaaatttcgg

SEQ ID NO: 16639 - DNA, 31 bp, Artificial Sequence
  Description of Artificial Sequence:  Enzymatic Nucleic Acid
gtcatgtgggctagctacaacgaataatttc

SEQ ID NO: 16640 - DNA, 31 bp, Artificial Sequence
  Description of Artificial Sequence:  Enzymatic Nucleic Acid
cagtcatgggctagctacaacgagtataatt

SEQ ID NO: 16641 - DNA, 31 bp, Artificial Sequence
  Description of Artificial Sequence:  Enzymatic Nucleic Acid
ttcagtcaggctagctacaacgagtgtataa

SEQ ID NO: 16642 - DNA, 31 bp, Artificial Sequence
  Description of Artificial Sequence:  Enzymatic Nucleic Acid
tccttcagggctagctacaacgacatgtgta

SEQ ID NO: 16643 - DNA, 31 bp, Artificial Sequence
  Description of Artificial Sequence:  Enzymatic Nucleic Acid
atgacgagggctagctacaacgatcccttcc

SEQ ID NO: 16644 - DNA, 31 bp, Artificial Sequence
  Description of Artificial Sequence:  Enzymatic Nucleic Acid
gggaatgaggctagctacaacgagagctccc

SEQ ID NO: 16645 - DNA, 31 bp, Artificial Sequence
  Description of Artificial Sequence:  Enzymatic Nucleic Acid
gcagggaaggctagctacaacgagacgagct

SEQ ID NO: 16646 - DNA, 31 bp, Artificial Sequence
  Description of Artificial Sequence:  Enzymatic Nucleic Acid
taacccggggctagctacaacgaagggaatg

SEQ ID NO: 16647 - DNA, 31 bp, Artificial Sequence
  Description of Artificial Sequence:  Enzymatic Nucleic Acid
tgacgtaaggctagctacaacgaccggcagg

SEQ ID NO: 16648 - DNA, 31 bp, Artificial Sequence
  Description of Artificial Sequence:  Enzymatic Nucleic Acid
aggtgacgggctagctacaacgaaacccggc

SEQ ID NO: 16649 - DNA, 31 bp, Artificial Sequence
  Description of Artificial Sequence:  Enzymatic Nucleic Acid
ttaggtgaggctagctacaacgagtaacccg

SEQ ID NO: 16650 - DNA, 31 bp, Artificial Sequence
  Description of Artificial Sequence:  Enzymatic Nucleic Acid
atgttaggggctagctacaacgagacgtaac

SEQ ID NO: 16651 - DNA, 31 bp, Artificial Sequence
  Description of Artificial Sequence:  Enzymatic Nucleic Acid
cagtgatgggctagctacaacgataggtgac

SEQ ID NO: 16652 - DNA, 31 bp, Artificial Sequence
  Description of Artificial Sequence:  Enzymatic Nucleic Acid
aacagtgaggctagctacaacgagttaggtg

SEQ ID NO: 16653 - DNA, 31 bp, Artificial Sequence
  Description of Artificial Sequence:  Enzymatic Nucleic Acid
agtaacagggctagctacaacgagatgttag

SEQ ID NO: 16654 - DNA, 31 bp, Artificial Sequence
  Description of Artificial Sequence:  Enzymatic Nucleic Acid
taaagtaaggctagctacaacgaagtgatgt

SEQ ID NO: 16655 - DNA, 31 bp, Artificial Sequence
  Description of Artificial Sequence:  Enzymatic Nucleic Acid
ttttaaagggctagctacaacgaaacagtga

SEQ ID NO: 16656 - DNA, 31 bp, Artificial Sequence
  Description of Artificial Sequence:  Enzymatic Nucleic Acid
agtggaaaggctagctacaacgattttttaa

SEQ ID NO: 16657 - DNA, 31 bp, Artificial Sequence
  Description of Artificial Sequence:  Enzymatic Nucleic Acid
gtgtcaagggctagctacaacgaggaaactt

SEQ ID NO: 16658 - DNA, 31 bp, Artificial Sequence
  Description of Artificial Sequence:  Enzymatic Nucleic Acid
tcaaagtgggctagctacaacgacaagtgga

SEQ ID NO: 16659 - DNA, 31 bp, Artificial Sequence
  Description of Artificial Sequence:  Enzymatic Nucleic Acid
gatcaaagggctagctacaacgagtcaagtg

SEQ ID NO: 16660 - DNA, 31 bp, Artificial Sequence
  Description of Artificial Sequence:  Enzymatic Nucleic Acid
atcagggaggctagctacaacgacaaagtgt

SEQ ID NO: 16661 - DNA, 31 bp, Artificial Sequence
  Description of Artificial Sequence:  Enzymatic Nucleic Acid
gttttccaggctagctacaacgacagggatc

SEQ ID NO: 16662 - DNA, 31 bp, Artificial Sequence
  Description of Artificial Sequence:  Enzymatic Nucleic Acid
attatgcgggctagctacaacgatttccatc

SEQ ID NO: 16663 - DNA, 31 bp, Artificial Sequence
  Description of Artificial Sequence:  Enzymatic Nucleic Acid
agattatgggctagctacaacgagttttcca

SEQ ID NO: 16664 - DNA, 31 bp, Artificial Sequence
  Description of Artificial Sequence:  Enzymatic Nucleic Acid
ccagattaggctagctacaacgagcgttttc

SEQ ID NO: 16665 - DNA, 31 bp, Artificial Sequence
  Description of Artificial Sequence:  Enzymatic Nucleic Acid
gtcccagaggctagctacaacgatatgcgtt

SEQ ID NO: 16666 - DNA, 31 bp, Artificial Sequence
  Description of Artificial Sequence:  Enzymatic Nucleic Acid
ttctactgggctagctacaacgacccagatt

SEQ ID NO: 16667 - DNA, 31 bp, Artificial Sequence
  Description of Artificial Sequence:  Enzymatic Nucleic Acid
cctttctaggctagctacaacgatgtcccag

SEQ ID NO: 16668 - DNA, 31 bp, Artificial Sequence
  Description of Artificial Sequence:  Enzymatic Nucleic Acid
tgatgaagggctagctacaacgacctttcta

SEQ ID NO: 16669 - DNA, 31 bp, Artificial Sequence
  Description of Artificial Sequence:  Enzymatic Nucleic Acid
tgatatgaggctagctacaacgagaagccct

SEQ ID NO: 16670 - DNA, 31 bp, Artificial Sequence
  Description of Artificial Sequence:  Enzymatic Nucleic Acid
atttgataggctagctacaacgagatgaagc

SEQ ID NO: 16671 - DNA, 31 bp, Artificial Sequence
  Description of Artificial Sequence:  Enzymatic Nucleic Acid
gcatttgaggctagctacaacgaatgatgaa

SEQ ID NO: 16672 - DNA, 31 bp, Artificial Sequence
  Description of Artificial Sequence:  Enzymatic Nucleic Acid
acgttgcaggctagctacaacgattgatatg

SEQ ID NO: 16673 - DNA, 31 bp, Artificial Sequence
  Description of Artificial Sequence:  Enzymatic Nucleic Acid
gtacgttgggctagctacaacgaatttgata

SEQ ID NO: 16674 - DNA, 31 bp, Artificial Sequence
  Description of Artificial Sequence:  Enzymatic Nucleic Acid
tttgtacgggctagctacaacgatgcatttg

SEQ ID NO: 16675 - DNA, 31 bp, Artificial Sequence
  Description of Artificial Sequence:  Enzymatic Nucleic Acid
tctttgtaggctagctacaacgagttgcatt

SEQ ID NO: 16676 - DNA, 31 bp, Artificial Sequence
  Description of Artificial Sequence:  Enzymatic Nucleic Acid
tttctttgggctagctacaacgaacgttgca

SEQ ID NO: 16677 - DNA, 31 bp, Artificial Sequence
  Description of Artificial Sequence:  Enzymatic Nucleic Acid
aagccctaggctagctacaacgattctttgt

SEQ ID NO: 16678 - DNA, 31 bp, Artificial Sequence
  Description of Artificial Sequence:  Enzymatic Nucleic Acid
gtcagaagggctagctacaacgacctatttc

SEQ ID NO: 16679 - DNA, 31 bp, Artificial Sequence
  Description of Artificial Sequence:  Enzymatic Nucleic Acid
ttcacaggggctagctacaacgacagaagcc

SEQ ID NO: 16680 - DNA, 31 bp, Artificial Sequence
  Description of Artificial Sequence:  Enzymatic Nucleic Acid
ttgcttcaggctagctacaacgaaggtcaga

SEQ ID NO: 16681 - DNA, 31 bp, Artificial Sequence
  Description of Artificial Sequence:  Enzymatic Nucleic Acid
gactgttgggctagctacaacgattcacagg

SEQ ID NO: 16682 - DNA, 31 bp, Artificial Sequence
  Description of Artificial Sequence:  Enzymatic Nucleic Acid
attgactgggctagctacaacgatgcttcac

SEQ ID NO: 16683 - DNA, 31 bp, Artificial Sequence
  Description of Artificial Sequence:  Enzymatic Nucleic Acid
cccattgaggctagctacaacgatgttgctt

SEQ ID NO: 16684 - DNA, 31 bp, Artificial Sequence
  Description of Artificial Sequence:  Enzymatic Nucleic Acid
aatgcccaggctagctacaacgatgactgtt

SEQ ID NO: 16685 - DNA, 31 bp, Artificial Sequence
  Description of Artificial Sequence:  Enzymatic Nucleic Acid
tacaaatgggctagctacaacgaccattgac

SEQ ID NO: 16686 - DNA, 31 bp, Artificial Sequence
  Description of Artificial Sequence:  Enzymatic Nucleic Acid
tatacaaaggctagctacaacgagcccattg

SEQ ID NO: 16687 - DNA, 31 bp, Artificial Sequence
  Description of Artificial Sequence:  Enzymatic Nucleic Acid
gtcttataggctagctacaacgaaaatgccc

SEQ ID NO: 16688 - DNA, 31 bp, Artificial Sequence
  Description of Artificial Sequence:  Enzymatic Nucleic Acid
ttgtcttaggctagctacaacgaacaaatgc

SEQ ID NO: 16689 - DNA, 31 bp, Artificial Sequence
  Description of Artificial Sequence:  Enzymatic Nucleic Acid
atagtttgggctagctacaacgacttataca

SEQ ID NO: 16690 - DNA, 31 bp, Artificial Sequence
  Description of Artificial Sequence:  Enzymatic Nucleic Acid
tgagatagggctagctacaacgattgtctta

SEQ ID NO: 16691 - DNA, 31 bp, Artificial Sequence
  Description of Artificial Sequence:  Enzymatic Nucleic Acid
gtgtgagaggctagctacaacgaagtttgtc

SEQ ID NO: 16692 - DNA, 31 bp, Artificial Sequence
  Description of Artificial Sequence:  Enzymatic Nucleic Acid
tcgatgtgggctagctacaacgagagatagt

SEQ ID NO: 16693 - DNA, 31 bp, Artificial Sequence
  Description of Artificial Sequence:  Enzymatic Nucleic Acid
tgtcgatgggctagctacaacgagtgagata

SEQ ID NO: 16694 - DNA, 31 bp, Artificial Sequence
  Description of Artificial Sequence:  Enzymatic Nucleic Acid
tttgtcgaggctagctacaacgagtgtgaga

SEQ ID NO: 16695 - DNA, 31 bp, Artificial Sequence
  Description of Artificial Sequence:  Enzymatic Nucleic Acid
ttggtttgggctagctacaacgacgatgtgt

SEQ ID NO: 16696 - DNA, 31 bp, Artificial Sequence
  Description of Artificial Sequence:  Enzymatic Nucleic Acid
tgtattggggctagctacaacgattgtcgat

SEQ ID NO: 16697 - DNA, 31 bp, Artificial Sequence
  Description of Artificial Sequence:  Enzymatic Nucleic Acid
tgattgtaggctagctacaacgatggtttgt

SEQ ID NO: 16698 - DNA, 31 bp, Artificial Sequence
  Description of Artificial Sequence:  Enzymatic Nucleic Acid
tatgattgggctagctacaacgaattggttt

SEQ ID NO: 16699 - DNA, 31 bp, Artificial Sequence
  Description of Artificial Sequence:  Enzymatic Nucleic Acid
atctatgaggctagctacaacgatgtattgg

SEQ ID NO: 16700 - DNA, 31 bp, Artificial Sequence
  Description of Artificial Sequence:  Enzymatic Nucleic Acid
gacatctaggctagctacaacgagattgtat

SEQ ID NO: 16701 - DNA, 31 bp, Artificial Sequence
  Description of Artificial Sequence:  Enzymatic Nucleic Acid
tttggacaggctagctacaacgactatgatt

SEQ ID NO: 16702 - DNA, 31 bp, Artificial Sequence
  Description of Artificial Sequence:  Enzymatic Nucleic Acid
tatttggaggctagctacaacgaatctatga

SEQ ID NO: 16703 - DNA, 31 bp, Artificial Sequence
  Description of Artificial Sequence:  Enzymatic Nucleic Acid
tgtgcttaggctagctacaacgattggacat

SEQ ID NO: 16704 - DNA, 31 bp, Artificial Sequence
  Description of Artificial Sequence:  Enzymatic Nucleic Acid
gtggtgtgggctagctacaacgattatttgg

SEQ ID NO: 16705 - DNA, 31 bp, Artificial Sequence
  Description of Artificial Sequence:  Enzymatic Nucleic Acid
gcgtggtgggctagctacaacgagcttattt

SEQ ID NO: 16706 - DNA, 31 bp, Artificial Sequence
  Description of Artificial Sequence:  Enzymatic Nucleic Acid
gggcgtggggctagctacaacgagtgcttat

SEQ ID NO: 16707 - DNA, 31 bp, Artificial Sequence
  Description of Artificial Sequence:  Enzymatic Nucleic Acid
actgggcgggctagctacaacgaggtgtgct

SEQ ID NO: 16708 - DNA, 31 bp, Artificial Sequence
  Description of Artificial Sequence:  Enzymatic Nucleic Acid
tgactgggggctagctacaacgagtggtgtg

SEQ ID NO: 16709 - DNA, 31 bp, Artificial Sequence
  Description of Artificial Sequence:  Enzymatic Nucleic Acid
taatttgaggctagctacaacgatgggcgtg

SEQ ID NO: 16710 - DNA, 31 bp, Artificial Sequence
  Description of Artificial Sequence:  Enzymatic Nucleic Acid
ctaagtaaggctagctacaacgattgactgg

SEQ ID NO: 16711 - DNA, 31 bp, Artificial Sequence
  Description of Artificial Sequence:  Enzymatic Nucleic Acid
cctctaagggctagctacaacgaaatttgac

SEQ ID NO: 16712 - DNA, 31 bp, Artificial Sequence
  Description of Artificial Sequence:  Enzymatic Nucleic Acid
gagtatggggctagctacaacgactctaagt

SEQ ID NO: 16713 - DNA, 31 bp, Artificial Sequence
  Description of Artificial Sequence:  Enzymatic Nucleic Acid
caagagtaggctagctacaacgaggcctcta

SEQ ID NO: 16714 - DNA, 31 bp, Artificial Sequence
  Description of Artificial Sequence:  Enzymatic Nucleic Acid
gacaagagggctagctacaacgaatggcctc

SEQ ID NO: 16715 - DNA, 31 bp, Artificial Sequence
  Description of Artificial Sequence:  Enzymatic Nucleic Acid
attgaggaggctagctacaacgaaagagtat

SEQ ID NO: 16716 - DNA, 31 bp, Artificial Sequence
  Description of Artificial Sequence:  Enzymatic Nucleic Acid
cagtacaaggctagctacaacgatgaggaca

SEQ ID NO: 16717 - DNA, 31 bp, Artificial Sequence
  Description of Artificial Sequence:  Enzymatic Nucleic Acid
tagcagtaggctagctacaacgaaattgagg

SEQ ID NO: 16718 - DNA, 31 bp, Artificial Sequence
  Description of Artificial Sequence:  Enzymatic Nucleic Acid
ggtagcagggctagctacaacgaacaattga

SEQ ID NO: 16719 - DNA, 31 bp, Artificial Sequence
  Description of Artificial Sequence:  Enzymatic Nucleic Acid
agtggtagggctagctacaacgaagtacaat

SEQ ID NO: 16720 - DNA, 31 bp, Artificial Sequence
  Description of Artificial Sequence:  Enzymatic Nucleic Acid
gggagtggggctagctacaacgaagcagtac

SEQ ID NO: 16721 - DNA, 31 bp, Artificial Sequence
  Description of Artificial Sequence:  Enzymatic Nucleic Acid
caagggagggctagctacaacgaggtagcag

SEQ ID NO: 16722 - DNA, 31 bp, Artificial Sequence
  Description of Artificial Sequence:  Enzymatic Nucleic Acid
ctctcgtgggctagctacaacgatcaaggga

SEQ ID NO: 16723 - DNA, 31 bp, Artificial Sequence
  Description of Artificial Sequence:  Enzymatic Nucleic Acid
aactctcgggctagctacaacgagttcaagg

SEQ ID NO: 16724 - DNA, 31 bp, Artificial Sequence
  Description of Artificial Sequence:  Enzymatic Nucleic Acid
catttgaaggctagctacaacgatctcgtgt

SEQ ID NO: 16725 - DNA, 31 bp, Artificial Sequence
  Description of Artificial Sequence:  Enzymatic Nucleic Acid
ccaggtcaggctagctacaacgattgaactc

SEQ ID NO: 16726 - DNA, 31 bp, Artificial Sequence
  Description of Artificial Sequence:  Enzymatic Nucleic Acid
actccaggggctagctacaacgacatttgaa

SEQ ID NO: 16727 - DNA, 31 bp, Artificial Sequence
  Description of Artificial Sequence:  Enzymatic Nucleic Acid
cagggtaaggctagctacaacgatccaggtc

SEQ ID NO: 16728 - DNA, 31 bp, Artificial Sequence
  Description of Artificial Sequence:  Enzymatic Nucleic Acid
catcagggggctagctacaacgaaactccag

SEQ ID NO: 16729 - DNA, 31 bp, Artificial Sequence
  Description of Artificial Sequence:  Enzymatic Nucleic Acid
ttttttcaggctagctacaacgacagggtaa

SEQ ID NO: 16730 - DNA, 31 bp, Artificial Sequence
  Description of Artificial Sequence:  Enzymatic Nucleic Acid
ctctcttaggctagctacaacgattttttca

SEQ ID NO: 16731 - DNA, 31 bp, Artificial Sequence
  Description of Artificial Sequence:  Enzymatic Nucleic Acid
tacggaagggctagctacaacgatctcttat

SEQ ID NO: 16732 - DNA, 31 bp, Artificial Sequence
  Description of Artificial Sequence:  Enzymatic Nucleic Acid
tcgccttaggctagctacaacgaggaagctc

SEQ ID NO: 16733 - DNA, 31 bp, Artificial Sequence
  Description of Artificial Sequence:  Enzymatic Nucleic Acid
attcgtcgggctagctacaacgacttacgga

SEQ ID NO: 16734 - DNA, 31 bp, Artificial Sequence
  Description of Artificial Sequence:  Enzymatic Nucleic Acid
tcaattcgggctagctacaacgacgccttac

SEQ ID NO: 16735 - DNA, 31 bp, Artificial Sequence
  Description of Artificial Sequence:  Enzymatic Nucleic Acid
ttggtcaaggctagctacaacgatcgtcgcc

SEQ ID NO: 16736 - DNA, 31 bp, Artificial Sequence
  Description of Artificial Sequence:  Enzymatic Nucleic Acid
tgctttggggctagctacaacgacaattcgt

SEQ ID NO: 16737 - DNA, 31 bp, Artificial Sequence
  Description of Artificial Sequence:  Enzymatic Nucleic Acid
gggaattgggctagctacaacgatttggtca

SEQ ID NO: 16738 - DNA, 31 bp, Artificial Sequence
  Description of Artificial Sequence:  Enzymatic Nucleic Acid
catgggaaggctagctacaacgatgctttgg

SEQ ID NO: 16739 - DNA, 31 bp, Artificial Sequence
  Description of Artificial Sequence:  Enzymatic Nucleic Acid
tgttggcaggctagctacaacgagggaattg

SEQ ID NO: 16740 - DNA, 31 bp, Artificial Sequence
  Description of Artificial Sequence:  Enzymatic Nucleic Acid
tatgttggggctagctacaacgaatgggaat

SEQ ID NO: 16741 - DNA, 31 bp, Artificial Sequence
  Description of Artificial Sequence:  Enzymatic Nucleic Acid
agaatatgggctagctacaacgatggcatgg

SEQ ID NO: 16742 - DNA, 31 bp, Artificial Sequence
  Description of Artificial Sequence:  Enzymatic Nucleic Acid
gtagaataggctagctacaacgagttggcat

SEQ ID NO: 16743 - DNA, 31 bp, Artificial Sequence
  Description of Artificial Sequence:  Enzymatic Nucleic Acid
ctgtagaaggctagctacaacgaatgttggc

SEQ ID NO: 16744 - DNA, 31 bp, Artificial Sequence
  Description of Artificial Sequence:  Enzymatic Nucleic Acid
gaacactgggctagctacaacgaagaatatg

SEQ ID NO: 16745 - DNA, 31 bp, Artificial Sequence
  Description of Artificial Sequence:  Enzymatic Nucleic Acid
taagaacaggctagctacaacgatgtagaat

SEQ ID NO: 16746 - DNA, 31 bp, Artificial Sequence
  Description of Artificial Sequence:  Enzymatic Nucleic Acid
agtaagaaggctagctacaacgaactgtaga

SEQ ID NO: 16747 - DNA, 31 bp, Artificial Sequence
  Description of Artificial Sequence:  Enzymatic Nucleic Acid
gtcaatagggctagctacaacgaaagaacac

SEQ ID NO: 16748 - DNA, 31 bp, Artificial Sequence
  Description of Artificial Sequence:  Enzymatic Nucleic Acid
tttgtcaaggctagctacaacgaagtaagaa

SEQ ID NO: 16749 - DNA, 31 bp, Artificial Sequence
  Description of Artificial Sequence:  Enzymatic Nucleic Acid
gcattttgggctagctacaacgacaatagta

SEQ ID NO: 16750 - DNA, 31 bp, Artificial Sequence
  Description of Artificial Sequence:  Enzymatic Nucleic Acid
gttctgcaggctagctacaacgatttgtcaa

SEQ ID NO: 16751 - DNA, 31 bp, Artificial Sequence
  Description of Artificial Sequence:  Enzymatic Nucleic Acid
ttgttctgggctagctacaacgaattttgtc

SEQ ID NO: 16752 - DNA, 31 bp, Artificial Sequence
  Description of Artificial Sequence:  Enzymatic Nucleic Acid
tgtctttgggctagctacaacgatctgcatt

SEQ ID NO: 16753 - DNA, 31 bp, Artificial Sequence
  Description of Artificial Sequence:  Enzymatic Nucleic Acid
gtcctttgggctagctacaacgactttgttc

SEQ ID NO: 16754 - DNA, 31 bp, Artificial Sequence
  Description of Artificial Sequence:  Enzymatic Nucleic Acid
gtataaagggctagctacaacgacctttgtc

SEQ ID NO: 16755 - DNA, 31 bp, Artificial Sequence
  Description of Artificial Sequence:  Enzymatic Nucleic Acid
gacaagtaggctagctacaacgaaaagtcct

SEQ ID NO: 16756 - DNA, 31 bp, Artificial Sequence
  Description of Artificial Sequence:  Enzymatic Nucleic Acid
acgacaagggctagctacaacgaataaagtc

SEQ ID NO: 16757 - DNA, 31 bp, Artificial Sequence
  Description of Artificial Sequence:  Enzymatic Nucleic Acid
ttacacgaggctagctacaacgaaagtataa

SEQ ID NO: 16758 - DNA, 31 bp, Artificial Sequence
  Description of Artificial Sequence:  Enzymatic Nucleic Acid
tccttacaggctagctacaacgagacaagta

SEQ ID NO: 16759 - DNA, 31 bp, Artificial Sequence
  Description of Artificial Sequence:  Enzymatic Nucleic Acid
actccttaggctagctacaacgaacgacaag

SEQ ID NO: 16760 - DNA, 31 bp, Artificial Sequence
  Description of Artificial Sequence:  Enzymatic Nucleic Acid
atggtccaggctagctacaacgatccttaca

SEQ ID NO: 16761 - DNA, 31 bp, Artificial Sequence
  Description of Artificial Sequence:  Enzymatic Nucleic Acid
aatgatggggctagctacaacgaccactcct

SEQ ID NO: 16762 - DNA, 31 bp, Artificial Sequence
  Description of Artificial Sequence:  Enzymatic Nucleic Acid
ttgaatgaggctagctacaacgaggtccact

SEQ ID NO: 16763 - DNA, 31 bp, Artificial Sequence
  Description of Artificial Sequence:  Enzymatic Nucleic Acid
gatttgaaggctagctacaacgagatggtcc

SEQ ID NO: 16764 - DNA, 31 bp, Artificial Sequence
  Description of Artificial Sequence:  Enzymatic Nucleic Acid
ttaacagaggctagctacaacgattgaatga

SEQ ID NO: 16765 - DNA, 31 bp, Artificial Sequence
  Description of Artificial Sequence:  Enzymatic Nucleic Acid
ggtgttaaggctagctacaacgaagatttga

SEQ ID NO: 16766 - DNA, 31 bp, Artificial Sequence
  Description of Artificial Sequence:  Enzymatic Nucleic Acid
ctgaggtgggctagctacaacgataacagat

SEQ ID NO: 16767 - DNA, 31 bp, Artificial Sequence
  Description of Artificial Sequence:  Enzymatic Nucleic Acid
cactgaggggctagctacaacgagttaacag

SEQ ID NO: 16768 - DNA, 31 bp, Artificial Sequence
  Description of Artificial Sequence:  Enzymatic Nucleic Acid
tatatgcaggctagctacaacgatgaggtgt

SEQ ID NO: 16769 - DNA, 31 bp, Artificial Sequence
  Description of Artificial Sequence:  Enzymatic Nucleic Acid
tatatatgggctagctacaacgaactgaggt

SEQ ID NO: 16770 - DNA, 31 bp, Artificial Sequence
  Description of Artificial Sequence:  Enzymatic Nucleic Acid
catatataggctagctacaacgagcactgag

SEQ ID NO: 16771 - DNA, 31 bp, Artificial Sequence
  Description of Artificial Sequence:  Enzymatic Nucleic Acid
atcatataggctagctacaacgaatgcactg

SEQ ID NO: 16772 - DNA, 31 bp, Artificial Sequence
  Description of Artificial Sequence:  Enzymatic Nucleic Acid
ttatcataggctagctacaacgaatatgcac

SEQ ID NO: 16773 - DNA, 31 bp, Artificial Sequence
  Description of Artificial Sequence:  Enzymatic Nucleic Acid
ctttatcaggctagctacaacgaatatatgc

SEQ ID NO: 16774 - DNA, 31 bp, Artificial Sequence
  Description of Artificial Sequence:  Enzymatic Nucleic Acid
atgctttaggctagctacaacgacatatata

SEQ ID NO: 16775 - DNA, 31 bp, Artificial Sequence
  Description of Artificial Sequence:  Enzymatic Nucleic Acid
gatgaatgggctagctacaacgatttatcat

SEQ ID NO: 16776 - DNA, 31 bp, Artificial Sequence
  Description of Artificial Sequence:  Enzymatic Nucleic Acid
gtgatgaaggctagctacaacgagctttatc

SEQ ID NO: 16777 - DNA, 31 bp, Artificial Sequence
  Description of Artificial Sequence:  Enzymatic Nucleic Acid
cacagtgaggctagctacaacgagaatgctt

SEQ ID NO: 16778 - DNA, 31 bp, Artificial Sequence
  Description of Artificial Sequence:  Enzymatic Nucleic Acid
tttcacagggctagctacaacgagatgaatg

SEQ ID NO: 16779 - DNA, 31 bp, Artificial Sequence
  Description of Artificial Sequence:  Enzymatic Nucleic Acid
atgtttcaggctagctacaacgaagtgatga

SEQ ID NO: 16780 - DNA, 31 bp, Artificial Sequence
  Description of Artificial Sequence:  Enzymatic Nucleic Acid
tttcgatgggctagctacaacgattcacagt

SEQ ID NO: 16781 - DNA, 31 bp, Artificial Sequence
  Description of Artificial Sequence:  Enzymatic Nucleic Acid
gttttcgaggctagctacaacgagtttcaca

SEQ ID NO: 16782 - DNA, 31 bp, Artificial Sequence
  Description of Artificial Sequence:  Enzymatic Nucleic Acid
acctgctgggctagctacaacgatttcgatg

SEQ ID NO: 16783 - DNA, 31 bp, Artificial Sequence
  Description of Artificial Sequence:  Enzymatic Nucleic Acid
agcacctgggctagctacaacgatgttttcg

SEQ ID NO: 16784 - DNA, 31 bp, Artificial Sequence
  Description of Artificial Sequence:  Enzymatic Nucleic Acid
ttcaagcaggctagctacaacgactgctgtt

SEQ ID NO: 16785 - DNA, 31 bp, Artificial Sequence
  Description of Artificial Sequence:  Enzymatic Nucleic Acid
gtttcaagggctagctacaacgaacctgctg

SEQ ID NO: 16786 - DNA, 31 bp, Artificial Sequence
  Description of Artificial Sequence:  Enzymatic Nucleic Acid
agctacggggctagctacaacgattcaagca

SEQ ID NO: 16787 - DNA, 31 bp, Artificial Sequence
  Description of Artificial Sequence:  Enzymatic Nucleic Acid
gccagctaggctagctacaacgaggtttcaa

SEQ ID NO: 16788 - DNA, 31 bp, Artificial Sequence
  Description of Artificial Sequence:  Enzymatic Nucleic Acid
cttgccagggctagctacaacgatacggttt

SEQ ID NO: 16789 - DNA, 31 bp, Artificial Sequence
  Description of Artificial Sequence:  Enzymatic Nucleic Acid
accgcttgggctagctacaacgacagctacg

SEQ ID NO: 16790 - DNA, 31 bp, Artificial Sequence
  Description of Artificial Sequence:  Enzymatic Nucleic Acid
taagaccgggctagctacaacgattgccagc

SEQ ID NO: 16791 - DNA, 31 bp, Artificial Sequence
  Description of Artificial Sequence:  Enzymatic Nucleic Acid
cggtaagaggctagctacaacgacgcttgcc

SEQ ID NO: 16792 - DNA, 31 bp, Artificial Sequence
  Description of Artificial Sequence:  Enzymatic Nucleic Acid
agagccggggctagctacaacgaaagaccgc

SEQ ID NO: 16793 - DNA, 31 bp, Artificial Sequence
  Description of Artificial Sequence:  Enzymatic Nucleic Acid
atagagagggctagctacaacgacggtaaga

SEQ ID NO: 16794 - DNA, 31 bp, Artificial Sequence
  Description of Artificial Sequence:  Enzymatic Nucleic Acid
cactttcaggctagctacaacgaagagagcc

SEQ ID NO: 16795 - DNA, 31 bp, Artificial Sequence
  Description of Artificial Sequence:  Enzymatic Nucleic Acid
tgccttcaggctagctacaacgatttcatag

SEQ ID NO: 16796 - DNA, 31 bp, Artificial Sequence
  Description of Artificial Sequence:  Enzymatic Nucleic Acid
gggaaatgggctagctacaacgacttcactt

SEQ ID NO: 16797 - DNA, 31 bp, Artificial Sequence
  Description of Artificial Sequence:  Enzymatic Nucleic Acid
gagggaaaggctagctacaacgagccttcac

SEQ ID NO: 16798 - DNA, 31 bp, Artificial Sequence
  Description of Artificial Sequence:  Enzymatic Nucleic Acid
acttccggggctagctacaacgagagggaaa

SEQ ID NO: 16799 - DNA, 31 bp, Artificial Sequence
  Description of Artificial Sequence:  Enzymatic Nucleic Acid
ccatacaaggctagctacaacgattccggcg

SEQ ID NO: 16800 - DNA, 31 bp, Artificial Sequence
  Description of Artificial Sequence:  Enzymatic Nucleic Acid
taaccataggctagctacaacgaaacttccg

SEQ ID NO: 16801 - DNA, 31 bp, Artificial Sequence
  Description of Artificial Sequence:  Enzymatic Nucleic Acid
tttaaccaggctagctacaacgaacaacttc

SEQ ID NO: 16802 - DNA, 31 bp, Artificial Sequence
  Description of Artificial Sequence:  Enzymatic Nucleic Acid
tcttttaaggctagctacaacgacatacaac

SEQ ID NO: 16803 - DNA, 31 bp, Artificial Sequence
  Description of Artificial Sequence:  Enzymatic Nucleic Acid
gtaacccaggctagctacaacgacttttaac

SEQ ID NO: 16804 - DNA, 31 bp, Artificial Sequence
  Description of Artificial Sequence:  Enzymatic Nucleic Acid
gcaggtaaggctagctacaacgaccatcttt

SEQ ID NO: 16805 - DNA, 31 bp, Artificial Sequence
  Description of Artificial Sequence:  Enzymatic Nucleic Acid
gtcgcaggggctagctacaacgaaacccatc

SEQ ID NO: 16806 - DNA, 31 bp, Artificial Sequence
  Description of Artificial Sequence:  Enzymatic Nucleic Acid
ctcagtcgggctagctacaacgaaggtaacc

SEQ ID NO: 16807 - DNA, 31 bp, Artificial Sequence
  Description of Artificial Sequence:  Enzymatic Nucleic Acid
tttctcagggctagctacaacgacgcaggta

SEQ ID NO: 16808 - DNA, 31 bp, Artificial Sequence
  Description of Artificial Sequence:  Enzymatic Nucleic Acid
cgagcagaggctagctacaacgattctcagt

SEQ ID NO: 16809 - DNA, 31 bp, Artificial Sequence
  Description of Artificial Sequence:  Enzymatic Nucleic Acid
atagcgagggctagctacaacgaagatttct

SEQ ID NO: 16810 - DNA, 31 bp, Artificial Sequence
  Description of Artificial Sequence:  Enzymatic Nucleic Acid
tcaaatagggctagctacaacgagagcagat

SEQ ID NO: 16811 - DNA, 31 bp, Artificial Sequence
  Description of Artificial Sequence:  Enzymatic Nucleic Acid
gagtcaaaggctagctacaacgaagcgagca

SEQ ID NO: 16812 - DNA, 31 bp, Artificial Sequence
  Description of Artificial Sequence:  Enzymatic Nucleic Acid
gccacgagggctagctacaacgacaaatagc

SEQ ID NO: 16813 - DNA, 31 bp, Artificial Sequence
  Description of Artificial Sequence:  Enzymatic Nucleic Acid
agtagccaggctagctacaacgagagtcaaa

SEQ ID NO: 16814 - DNA, 31 bp, Artificial Sequence
  Description of Artificial Sequence:  Enzymatic Nucleic Acid
acgagtagggctagctacaacgacacgagtc

SEQ ID NO: 16815 - DNA, 31 bp, Artificial Sequence
  Description of Artificial Sequence:  Enzymatic Nucleic Acid
ttaacgagggctagctacaacgaagccacga

SEQ ID NO: 16816 - DNA, 31 bp, Artificial Sequence
  Description of Artificial Sequence:  Enzymatic Nucleic Acid
ataattaaggctagctacaacgagagtagcc

SEQ ID NO: 16817 - DNA, 31 bp, Artificial Sequence
  Description of Artificial Sequence:  Enzymatic Nucleic Acid
cttgataaggctagctacaacgataacgagt

SEQ ID NO: 16818 - DNA, 31 bp, Artificial Sequence
  Description of Artificial Sequence:  Enzymatic Nucleic Acid
gtccttgaggctagctacaacgaaattaacg

SEQ ID NO: 16819 - DNA, 31 bp, Artificial Sequence
  Description of Artificial Sequence:  Enzymatic Nucleic Acid
cagttacgggctagctacaacgaccttgata

SEQ ID NO: 16820 - DNA, 31 bp, Artificial Sequence
  Description of Artificial Sequence:  Enzymatic Nucleic Acid
ttcagttaggctagctacaacgagtccttga

SEQ ID NO: 16821 - DNA, 31 bp, Artificial Sequence
  Description of Artificial Sequence:  Enzymatic Nucleic Acid
ctcttcagggctagctacaacgatacgtcct

SEQ ID NO: 16822 - DNA, 31 bp, Artificial Sequence
  Description of Artificial Sequence:  Enzymatic Nucleic Acid
tccctgcaggctagctacaacgacctcttca

SEQ ID NO: 16823 - DNA, 31 bp, Artificial Sequence
  Description of Artificial Sequence:  Enzymatic Nucleic Acid
attccctgggctagctacaacgaatcctctt

SEQ ID NO: 16824 - DNA, 31 bp, Artificial Sequence
  Description of Artificial Sequence:  Enzymatic Nucleic Acid
ttgtataaggctagctacaacgatccctgca

SEQ ID NO: 16825 - DNA, 31 bp, Artificial Sequence
  Description of Artificial Sequence:  Enzymatic Nucleic Acid
agattgtaggctagctacaacgaaattccct

SEQ ID NO: 16826 - DNA, 31 bp, Artificial Sequence
  Description of Artificial Sequence:  Enzymatic Nucleic Acid
caagattgggctagctacaacgaataattcc

SEQ ID NO: 16827 - DNA, 31 bp, Artificial Sequence
  Description of Artificial Sequence:  Enzymatic Nucleic Acid
cagcaagaggctagctacaacgatgtataat

SEQ ID NO: 16828 - DNA, 31 bp, Artificial Sequence
  Description of Artificial Sequence:  Enzymatic Nucleic Acid
atgctcagggctagctacaacgaaagattgt

SEQ ID NO: 16829 - DNA, 31 bp, Artificial Sequence
  Description of Artificial Sequence:  Enzymatic Nucleic Acid
gttttatgggctagctacaacgatcagcaag

SEQ ID NO: 16830 - DNA, 31 bp, Artificial Sequence
  Description of Artificial Sequence:  Enzymatic Nucleic Acid
ctgttttaggctagctacaacgagctcagca

SEQ ID NO: 16831 - DNA, 31 bp, Artificial Sequence
  Description of Artificial Sequence:  Enzymatic Nucleic Acid
tttgactgggctagctacaacgatttatgct

SEQ ID NO: 16832 - DNA, 31 bp, Artificial Sequence
  Description of Artificial Sequence:  Enzymatic Nucleic Acid
acatttgaggctagctacaacgatgttttat

SEQ ID NO: 16833 - DNA, 31 bp, Artificial Sequence
  Description of Artificial Sequence:  Enzymatic Nucleic Acid
taaacacaggctagctacaacgattgactgt

SEQ ID NO: 16834 - DNA, 31 bp, Artificial Sequence
  Description of Artificial Sequence:  Enzymatic Nucleic Acid
tttaaacaggctagctacaacgaatttgact

SEQ ID NO: 16835 - DNA, 31 bp, Artificial Sequence
  Description of Artificial Sequence:  Enzymatic Nucleic Acid
tttttaaaggctagctacaacgaacatttga

SEQ ID NO: 16836 - DNA, 31 bp, Artificial Sequence
  Description of Artificial Sequence:  Enzymatic Nucleic Acid
cagtgaggggctagctacaacgattttaaac

SEQ ID NO: 16837 - DNA, 31 bp, Artificial Sequence
  Description of Artificial Sequence:  Enzymatic Nucleic Acid
agtggcagggctagctacaacgagaggtttt

SEQ ID NO: 16838 - DNA, 31 bp, Artificial Sequence
  Description of Artificial Sequence:  Enzymatic Nucleic Acid
tagagtggggctagctacaacgaagtgaggt

SEQ ID NO: 16839 - DNA, 31 bp, Artificial Sequence
  Description of Artificial Sequence:  Enzymatic Nucleic Acid
aattagagggctagctacaacgaggcagtga

SEQ ID NO: 16840 - DNA, 31 bp, Artificial Sequence
  Description of Artificial Sequence:  Enzymatic Nucleic Acid
attgacaaggctagctacaacgatagagtgg

SEQ ID NO: 16841 - DNA, 31 bp, Artificial Sequence
  Description of Artificial Sequence:  Enzymatic Nucleic Acid
cacattgaggctagctacaacgaaattagag

SEQ ID NO: 16842 - DNA, 31 bp, Artificial Sequence
  Description of Artificial Sequence:  Enzymatic Nucleic Acid
gtttcacaggctagctacaacgatgacaatt

SEQ ID NO: 16843 - DNA, 31 bp, Artificial Sequence
  Description of Artificial Sequence:  Enzymatic Nucleic Acid
gggtttcaggctagctacaacgaattgacaa

SEQ ID NO: 16844 - DNA, 31 bp, Artificial Sequence
  Description of Artificial Sequence:  Enzymatic Nucleic Acid
atctggggggctagctacaacgattcacatt

SEQ ID NO: 16845 - DNA, 31 bp, Artificial Sequence
  Description of Artificial Sequence:  Enzymatic Nucleic Acid
ttcgtaaaggctagctacaacgactggggtt

SEQ ID NO: 16846 - DNA, 31 bp, Artificial Sequence
  Description of Artificial Sequence:  Enzymatic Nucleic Acid
ccttttcgggctagctacaacgaaaatctgg

SEQ ID NO: 16847 - DNA, 31 bp, Artificial Sequence
  Description of Artificial Sequence:  Enzymatic Nucleic Acid
tgacacggggctagctacaacgacttttcgt

SEQ ID NO: 16848 - DNA, 31 bp, Artificial Sequence
  Description of Artificial Sequence:  Enzymatic Nucleic Acid
cgatgacaggctagctacaacgaggcctttt

SEQ ID NO: 16849 - DNA, 31 bp, Artificial Sequence
  Description of Artificial Sequence:  Enzymatic Nucleic Acid
aacgatgaggctagctacaacgaacggcctt

SEQ ID NO: 16850 - DNA, 31 bp, Artificial Sequence
  Description of Artificial Sequence:  Enzymatic Nucleic Acid
ggaaacgaggctagctacaacgagacacggc

SEQ ID NO: 16851 - DNA, 31 bp, Artificial Sequence
  Description of Artificial Sequence:  Enzymatic Nucleic Acid
tctggaaaggctagctacaacgagatgacac

SEQ ID NO: 16852 - DNA, 31 bp, Artificial Sequence
  Description of Artificial Sequence:  Enzymatic Nucleic Acid
gagccgggggctagctacaacgactggaaac

SEQ ID NO: 16853 - DNA, 31 bp, Artificial Sequence
  Description of Artificial Sequence:  Enzymatic Nucleic Acid
gtagagagggctagctacaacgacgggtctg

SEQ ID NO: 16854 - DNA, 31 bp, Artificial Sequence
  Description of Artificial Sequence:  Enzymatic Nucleic Acid
ccagtgggggctagctacaacgaagagagcc

SEQ ID NO: 16855 - DNA, 31 bp, Artificial Sequence
  Description of Artificial Sequence:  Enzymatic Nucleic Acid
ctgcccagggctagctacaacgagggtagag

SEQ ID NO: 16856 - DNA, 31 bp, Artificial Sequence
  Description of Artificial Sequence:  Enzymatic Nucleic Acid
gtctgctgggctagctacaacgaccagtggg

SEQ ID NO: 16857 - DNA, 31 bp, Artificial Sequence
  Description of Artificial Sequence:  Enzymatic Nucleic Acid
tttgtctgggctagctacaacgatgcccagt

SEQ ID NO: 16858 - DNA, 31 bp, Artificial Sequence
  Description of Artificial Sequence:  Enzymatic Nucleic Acid
aggatttgggctagctacaacgactgctgcc

SEQ ID NO: 16859 - DNA, 31 bp, Artificial Sequence
  Description of Artificial Sequence:  Enzymatic Nucleic Acid
agtcaggaggctagctacaacgattgtctgc

SEQ ID NO: 16860 - DNA, 31 bp, Artificial Sequence
  Description of Artificial Sequence:  Enzymatic Nucleic Acid
ggtacaagggctagctacaacgacaggattt

SEQ ID NO: 16861 - DNA, 31 bp, Artificial Sequence
  Description of Artificial Sequence:  Enzymatic Nucleic Acid
atgcggtaggctagctacaacgaaagtcagg

SEQ ID NO: 16862 - DNA, 31 bp, Artificial Sequence
  Description of Artificial Sequence:  Enzymatic Nucleic Acid
atatgcggggctagctacaacgaacaagtca

SEQ ID NO: 16863 - DNA, 31 bp, Artificial Sequence
  Description of Artificial Sequence:  Enzymatic Nucleic Acid
accatatgggctagctacaacgaggtacaag

SEQ ID NO: 16864 - DNA, 31 bp, Artificial Sequence
  Description of Artificial Sequence:  Enzymatic Nucleic Acid
ataccataggctagctacaacgagcggtaca

SEQ ID NO: 16865 - DNA, 31 bp, Artificial Sequence
  Description of Artificial Sequence:  Enzymatic Nucleic Acid
ggataccaggctagctacaacgaatgcggta

SEQ ID NO: 16866 - DNA, 31 bp, Artificial Sequence
  Description of Artificial Sequence:  Enzymatic Nucleic Acid
gagggataggctagctacaacgacatatgcg

SEQ ID NO: 16867 - DNA, 31 bp, Artificial Sequence
  Description of Artificial Sequence:  Enzymatic Nucleic Acid
ttgagggaggctagctacaacgaaccatatg

SEQ ID NO: 16868 - DNA, 31 bp, Artificial Sequence
  Description of Artificial Sequence:  Enzymatic Nucleic Acid
attgtaggggctagctacaacgatgagggat

SEQ ID NO: 16869 - DNA, 31 bp, Artificial Sequence
  Description of Artificial Sequence:  Enzymatic Nucleic Acid
cttgattgggctagctacaacgaaggttgag

SEQ ID NO: 16870 - DNA, 31 bp, Artificial Sequence
  Description of Artificial Sequence:  Enzymatic Nucleic Acid
ccacttgaggctagctacaacgatgtaggtt

SEQ ID NO: 16871 - DNA, 31 bp, Artificial Sequence
  Description of Artificial Sequence:  Enzymatic Nucleic Acid
cagaaccaggctagctacaacgattgattgt

SEQ ID NO: 16872 - DNA, 31 bp, Artificial Sequence
  Description of Artificial Sequence:  Enzymatic Nucleic Acid
tgccagaaggctagctacaacgacacttgat

SEQ ID NO: 16873 - DNA, 31 bp, Artificial Sequence
  Description of Artificial Sequence:  Enzymatic Nucleic Acid
caggggtgggctagctacaacgacagaacca

SEQ ID NO: 16874 - DNA, 31 bp, Artificial Sequence
  Description of Artificial Sequence:  Enzymatic Nucleic Acid
tacaggggggctagctacaacgagccagaac

SEQ ID NO: 16875 - DNA, 31 bp, Artificial Sequence
  Description of Artificial Sequence:  Enzymatic Nucleic Acid
tatggttaggctagctacaacgaaggggtgc

SEQ ID NO: 16876 - DNA, 31 bp, Artificial Sequence
  Description of Artificial Sequence:  Enzymatic Nucleic Acid
gattatggggctagctacaacgatacagggg

SEQ ID NO: 16877 - DNA, 31 bp, Artificial Sequence
  Description of Artificial Sequence:  Enzymatic Nucleic Acid
aatgattaggctagctacaacgaggttacag

SEQ ID NO: 16878 - DNA, 31 bp, Artificial Sequence
  Description of Artificial Sequence:  Enzymatic Nucleic Acid
cggaatgaggctagctacaacgatatggtta

SEQ ID NO: 16879 - DNA, 31 bp, Artificial Sequence
  Description of Artificial Sequence:  Enzymatic Nucleic Acid
cttcggaaggctagctacaacgagattatgg

SEQ ID NO: 16880 - DNA, 31 bp, Artificial Sequence
  Description of Artificial Sequence:  Enzymatic Nucleic Acid
acaccttgggctagctacaacgattcggaat

SEQ ID NO: 16881 - DNA, 31 bp, Artificial Sequence
  Description of Artificial Sequence:  Enzymatic Nucleic Acid
aagtcacaggctagctacaacgacttgcttc

SEQ ID NO: 16882 - DNA, 31 bp, Artificial Sequence
  Description of Artificial Sequence:  Enzymatic Nucleic Acid
aaaagtcaggctagctacaacgaaccttgct

SEQ ID NO: 16883 - DNA, 31 bp, Artificial Sequence
  Description of Artificial Sequence:  Enzymatic Nucleic Acid
aacaaaagggctagctacaacgacacacctt

SEQ ID NO: 16884 - DNA, 31 bp, Artificial Sequence
  Description of Artificial Sequence:  Enzymatic Nucleic Acid
tattggaaggctagctacaacgaaaaagtca

SEQ ID NO: 16885 - DNA, 31 bp, Artificial Sequence
  Description of Artificial Sequence:  Enzymatic Nucleic Acid
cttcattaggctagctacaacgatggaacaa

SEQ ID NO: 16886 - DNA, 31 bp, Artificial Sequence
  Description of Artificial Sequence:  Enzymatic Nucleic Acid
actcttcaggctagctacaacgatattggaa

SEQ ID NO: 16887 - DNA, 31 bp, Artificial Sequence
  Description of Artificial Sequence:  Enzymatic Nucleic Acid
ataaaggaggctagctacaacgatcttcatt

SEQ ID NO: 16888 - DNA, 31 bp, Artificial Sequence
  Description of Artificial Sequence:  Enzymatic Nucleic Acid
atccaggaggctagctacaacgaaaaggact

SEQ ID NO: 16889 - DNA, 31 bp, Artificial Sequence
  Description of Artificial Sequence:  Enzymatic Nucleic Acid
tgtcagcaggctagctacaacgaccaggata

SEQ ID NO: 16890 - DNA, 31 bp, Artificial Sequence
  Description of Artificial Sequence:  Enzymatic Nucleic Acid
gctgtcagggctagctacaacgaatccagga

SEQ ID NO: 16891 - DNA, 31 bp, Artificial Sequence
  Description of Artificial Sequence:  Enzymatic Nucleic Acid
tgttgctgggctagctacaacgacagcatcc

SEQ ID NO: 16892 - DNA, 31 bp, Artificial Sequence
  Description of Artificial Sequence:  Enzymatic Nucleic Acid
ccatgttgggctagctacaacgatgtcagca

SEQ ID NO: 16893 - DNA, 31 bp, Artificial Sequence
  Description of Artificial Sequence:  Enzymatic Nucleic Acid
ttcccatgggctagctacaacgatgctgtca

SEQ ID NO: 16894 - DNA, 31 bp, Artificial Sequence
  Description of Artificial Sequence:  Enzymatic Nucleic Acid
gtttcccaggctagctacaacgagttgctgt

SEQ ID NO: 16895 - DNA, 31 bp, Artificial Sequence
  Description of Artificial Sequence:  Enzymatic Nucleic Acid
caattctgggctagctacaacgattcccatg

SEQ ID NO: 16896 - DNA, 31 bp, Artificial Sequence
  Description of Artificial Sequence:  Enzymatic Nucleic Acid
gctctcaaggctagctacaacgatctgtttc

SEQ ID NO: 16897 - DNA, 31 bp, Artificial Sequence
  Description of Artificial Sequence:  Enzymatic Nucleic Acid
gagtgatgggctagctacaacgatctcaatt

SEQ ID NO: 16898 - DNA, 31 bp, Artificial Sequence
  Description of Artificial Sequence:  Enzymatic Nucleic Acid
ctgagtgaggctagctacaacgagctctcaa

SEQ ID NO: 16899 - DNA, 31 bp, Artificial Sequence
  Description of Artificial Sequence:  Enzymatic Nucleic Acid
gcgctgagggctagctacaacgagatgctct

SEQ ID NO: 16900 - DNA, 31 bp, Artificial Sequence
  Description of Artificial Sequence:  Enzymatic Nucleic Acid
gccatgcgggctagctacaacgatgagtgat

SEQ ID NO: 16901 - DNA, 31 bp, Artificial Sequence
  Description of Artificial Sequence:  Enzymatic Nucleic Acid
ttgccatgggctagctacaacgagctgagtg

SEQ ID NO: 16902 - DNA, 31 bp, Artificial Sequence
  Description of Artificial Sequence:  Enzymatic Nucleic Acid
tattgccaggctagctacaacgagcgctgag

SEQ ID NO: 16903 - DNA, 31 bp, Artificial Sequence
  Description of Artificial Sequence:  Enzymatic Nucleic Acid
tattattgggctagctacaacgacatgcgct

SEQ ID NO: 16904 - DNA, 31 bp, Artificial Sequence
  Description of Artificial Sequence:  Enzymatic Nucleic Acid
ttctattaggctagctacaacgatgccatgc

SEQ ID NO: 16905 - DNA, 31 bp, Artificial Sequence
  Description of Artificial Sequence:  Enzymatic Nucleic Acid
tccttctaggctagctacaacgatattgcca

SEQ ID NO: 16906 - DNA, 31 bp, Artificial Sequence
  Description of Artificial Sequence:  Enzymatic Nucleic Acid
ccatcttaggctagctacaacgatctttcct

SEQ ID NO: 16907 - DNA, 31 bp, Artificial Sequence
  Description of Artificial Sequence:  Enzymatic Nucleic Acid
gctagccaggctagctacaacgacttattct

SEQ ID NO: 16908 - DNA, 31 bp, Artificial Sequence
  Description of Artificial Sequence:  Enzymatic Nucleic Acid
ggtgctagggctagctacaacgacatcttat

SEQ ID NO: 16909 - DNA, 31 bp, Artificial Sequence
  Description of Artificial Sequence:  Enzymatic Nucleic Acid
ccaaggtgggctagctacaacgatagccatc

SEQ ID NO: 16910 - DNA, 31 bp, Artificial Sequence
  Description of Artificial Sequence:  Enzymatic Nucleic Acid
aaccaaggggctagctacaacgagctagcca

SEQ ID NO: 16911 - DNA, 31 bp, Artificial Sequence
  Description of Artificial Sequence:  Enzymatic Nucleic Acid
agccacaaggctagctacaacgacaaggtgc

SEQ ID NO: 16912 - DNA, 31 bp, Artificial Sequence
  Description of Artificial Sequence:  Enzymatic Nucleic Acid
gtcagccaggctagctacaacgaaaccaagg

SEQ ID NO: 16913 - DNA, 31 bp, Artificial Sequence
  Description of Artificial Sequence:  Enzymatic Nucleic Acid
agagtcagggctagctacaacgacacaacca

SEQ ID NO: 16914 - DNA, 31 bp, Artificial Sequence
  Description of Artificial Sequence:  Enzymatic Nucleic Acid
ttctagagggctagctacaacgacagccaca

SEQ ID NO: 16915 - DNA, 31 bp, Artificial Sequence
  Description of Artificial Sequence:  Enzymatic Nucleic Acid
tccagaaaggctagctacaacgatctagagt

SEQ ID NO: 16916 - DNA, 31 bp, Artificial Sequence
  Description of Artificial Sequence:  Enzymatic Nucleic Acid
aatgtagaggctagctacaacgatccagaaa

SEQ ID NO: 16917 - DNA, 31 bp, Artificial Sequence
  Description of Artificial Sequence:  Enzymatic Nucleic Acid
tgcaaatgggctagctacaacgaagattcca

SEQ ID NO: 16918 - DNA, 31 bp, Artificial Sequence
  Description of Artificial Sequence:  Enzymatic Nucleic Acid
tatgcaaaggctagctacaacgagtagattc

SEQ ID NO: 16919 - DNA, 31 bp, Artificial Sequence
  Description of Artificial Sequence:  Enzymatic Nucleic Acid
aagctatgggctagctacaacgaaaatgtag

SEQ ID NO: 16920 - DNA, 31 bp, Artificial Sequence
  Description of Artificial Sequence:  Enzymatic Nucleic Acid
ggaagctaggctagctacaacgagcaaatgt

SEQ ID NO: 16921 - DNA, 31 bp, Artificial Sequence
  Description of Artificial Sequence:  Enzymatic Nucleic Acid
attggaagggctagctacaacgatatgcaaa

SEQ ID NO: 16922 - DNA, 31 bp, Artificial Sequence
  Description of Artificial Sequence:  Enzymatic Nucleic Acid
caactttaggctagctacaacgatggaagct

SEQ ID NO: 16923 - DNA, 31 bp, Artificial Sequence
  Description of Artificial Sequence:  Enzymatic Nucleic Acid
agtcccaaggctagctacaacgatttattgg

SEQ ID NO: 16924 - DNA, 31 bp, Artificial Sequence
  Description of Artificial Sequence:  Enzymatic Nucleic Acid
tcccacagggctagctacaacgacccaactt

SEQ ID NO: 16925 - DNA, 31 bp, Artificial Sequence
  Description of Artificial Sequence:  Enzymatic Nucleic Acid
tcttcccaggctagctacaacgaagtcccaa

SEQ ID NO: 16926 - DNA, 31 bp, Artificial Sequence
  Description of Artificial Sequence:  Enzymatic Nucleic Acid
agcttatgggctagctacaacgattcttccc

SEQ ID NO: 16927 - DNA, 31 bp, Artificial Sequence
  Description of Artificial Sequence:  Enzymatic Nucleic Acid
aaagcttaggctagctacaacgagtttcttc

SEQ ID NO: 16928 - DNA, 31 bp, Artificial Sequence
  Description of Artificial Sequence:  Enzymatic Nucleic Acid
tataaaagggctagctacaacgattatgttt

SEQ ID NO: 16929 - DNA, 31 bp, Artificial Sequence
  Description of Artificial Sequence:  Enzymatic Nucleic Acid
ctgtgataggctagctacaacgaaaaagctt

SEQ ID NO: 16930 - DNA, 31 bp, Artificial Sequence
  Description of Artificial Sequence:  Enzymatic Nucleic Acid
atctgtgaggctagctacaacgaataaaagc

SEQ ID NO: 16931 - DNA, 31 bp, Artificial Sequence
  Description of Artificial Sequence:  Enzymatic Nucleic Acid
cacatctgggctagctacaacgagatataaa

SEQ ID NO: 16932 - DNA, 31 bp, Artificial Sequence
  Description of Artificial Sequence:  Enzymatic Nucleic Acid
ttggcacaggctagctacaacgactgtgata

SEQ ID NO: 16933 - DNA, 31 bp, Artificial Sequence
  Description of Artificial Sequence:  Enzymatic Nucleic Acid
atttggcaggctagctacaacgaatctgtga

SEQ ID NO: 16934 - DNA, 31 bp, Artificial Sequence
  Description of Artificial Sequence:  Enzymatic Nucleic Acid
ccatttggggctagctacaacgaacatctgt

SEQ ID NO: 16935 - DNA, 31 bp, Artificial Sequence
  Description of Artificial Sequence:  Enzymatic Nucleic Acid
gaaacccaggctagctacaacgattggcaca

SEQ ID NO: 16936 - DNA, 31 bp, Artificial Sequence
  Description of Artificial Sequence:  Enzymatic Nucleic Acid
acatgaaaggctagctacaacgaccatttgg

SEQ ID NO: 16937 - DNA, 31 bp, Artificial Sequence
  Description of Artificial Sequence:  Enzymatic Nucleic Acid
agttaacaggctagctacaacgagaaaccca

SEQ ID NO: 16938 - DNA, 31 bp, Artificial Sequence
  Description of Artificial Sequence:  Enzymatic Nucleic Acid
caagttaaggctagctacaacgaatgaaacc

SEQ ID NO: 16939 - DNA, 31 bp, Artificial Sequence
  Description of Artificial Sequence:  Enzymatic Nucleic Acid
tttccaagggctagctacaacgataacatga

SEQ ID NO: 16940 - DNA, 31 bp, Artificial Sequence
  Description of Artificial Sequence:  Enzymatic Nucleic Acid
cgtcggcaggctagctacaacgatttttcca

SEQ ID NO: 16941 - DNA, 31 bp, Artificial Sequence
  Description of Artificial Sequence:  Enzymatic Nucleic Acid
tccgtcggggctagctacaacgaattttttc

SEQ ID NO: 16942 - DNA, 31 bp, Artificial Sequence
  Description of Artificial Sequence:  Enzymatic Nucleic Acid
tccttccgggctagctacaacgacggcattt

SEQ ID NO: 16943 - DNA, 31 bp, Artificial Sequence
  Description of Artificial Sequence:  Enzymatic Nucleic Acid
gtttcaggggctagctacaacgacctctcct

SEQ ID NO: 16944 - DNA, 31 bp, Artificial Sequence
  Description of Artificial Sequence:  Enzymatic Nucleic Acid
caagacagggctagctacaacgattcaggtc

SEQ ID NO: 16945 - DNA, 31 bp, Artificial Sequence
  Description of Artificial Sequence:  Enzymatic Nucleic Acid
gtgcaagaggctagctacaacgaagtttcag

SEQ ID NO: 16946 - DNA, 31 bp, Artificial Sequence
  Description of Artificial Sequence:  Enzymatic Nucleic Acid
taactgtgggctagctacaacgaaagacagt

SEQ ID NO: 16947 - DNA, 31 bp, Artificial Sequence
  Description of Artificial Sequence:  Enzymatic Nucleic Acid
gttaactgggctagctacaacgagcaagaca

SEQ ID NO: 16948 - DNA, 31 bp, Artificial Sequence
  Description of Artificial Sequence:  Enzymatic Nucleic Acid
cttgttaaggctagctacaacgatgtgcaag

SEQ ID NO: 16949 - DNA, 31 bp, Artificial Sequence
  Description of Artificial Sequence:  Enzymatic Nucleic Acid
agaacttgggctagctacaacgataactgtg

SEQ ID NO: 16950 - DNA, 31 bp, Artificial Sequence
  Description of Artificial Sequence:  Enzymatic Nucleic Acid
tataagaaggctagctacaacgattgttaac

SEQ ID NO: 16951 - DNA, 31 bp, Artificial Sequence
  Description of Artificial Sequence:  Enzymatic Nucleic Acid
tctctgtaggctagctacaacgaaagaactt

SEQ ID NO: 16952 - DNA, 31 bp, Artificial Sequence
  Description of Artificial Sequence:  Enzymatic Nucleic Acid
cgtctctgggctagctacaacgaataagaac

SEQ ID NO: 16953 - DNA, 31 bp, Artificial Sequence
  Description of Artificial Sequence:  Enzymatic Nucleic Acid
aagtaacgggctagctacaacgactctgtat

SEQ ID NO: 16954 - DNA, 31 bp, Artificial Sequence
  Description of Artificial Sequence:  Enzymatic Nucleic Acid
ccaagtaaggctagctacaacgagtctctgt

SEQ ID NO: 16955 - DNA, 31 bp, Artificial Sequence
  Description of Artificial Sequence:  Enzymatic Nucleic Acid
aatccaagggctagctacaacgaaacgtctc

SEQ ID NO: 16956 - DNA, 31 bp, Artificial Sequence
  Description of Artificial Sequence:  Enzymatic Nucleic Acid
cagtaaaaggctagctacaacgaccaagtaa

SEQ ID NO: 16957 - DNA, 31 bp, Artificial Sequence
  Description of Artificial Sequence:  Enzymatic Nucleic Acid
gtccgcagggctagctacaacgaaaaatcca

SEQ ID NO: 16958 - DNA, 31 bp, Artificial Sequence
  Description of Artificial Sequence:  Enzymatic Nucleic Acid
actgtccgggctagctacaacgaagtaaaat

SEQ ID NO: 16959 - DNA, 31 bp, Artificial Sequence
  Description of Artificial Sequence:  Enzymatic Nucleic Acid
attaactgggctagctacaacgaccgcagta

SEQ ID NO: 16960 - DNA, 31 bp, Artificial Sequence
  Description of Artificial Sequence:  Enzymatic Nucleic Acid
gttattaaggctagctacaacgatgtccgca

SEQ ID NO: 16961 - DNA, 31 bp, Artificial Sequence
  Description of Artificial Sequence:  Enzymatic Nucleic Acid
ttctgttaggctagctacaacgataactgtc

SEQ ID NO: 16962 - DNA, 31 bp, Artificial Sequence
  Description of Artificial Sequence:  Enzymatic Nucleic Acid
ttgttctgggctagctacaacgatattaact

SEQ ID NO: 16963 - DNA, 31 bp, Artificial Sequence
  Description of Artificial Sequence:  Enzymatic Nucleic Acid
gtgcattgggctagctacaacgatctgttat

SEQ ID NO: 16964 - DNA, 31 bp, Artificial Sequence
  Description of Artificial Sequence:  Enzymatic Nucleic Acid
gtagtgcaggctagctacaacgatgttctgt

SEQ ID NO: 16965 - DNA, 31 bp, Artificial Sequence
  Description of Artificial Sequence:  Enzymatic Nucleic Acid
ctgtagtgggctagctacaacgaattgttct

SEQ ID NO: 16966 - DNA, 31 bp, Artificial Sequence
  Description of Artificial Sequence:  Enzymatic Nucleic Acid
tactgtagggctagctacaacgagcattgtt

SEQ ID NO: 16967 - DNA, 31 bp, Artificial Sequence
  Description of Artificial Sequence:  Enzymatic Nucleic Acid
taatactgggctagctacaacgaagtgcatt

SEQ ID NO: 16968 - DNA, 31 bp, Artificial Sequence
  Description of Artificial Sequence:  Enzymatic Nucleic Acid
tgctaataggctagctacaacgatgtagtgc

SEQ ID NO: 16969 - DNA, 31 bp, Artificial Sequence
  Description of Artificial Sequence:  Enzymatic Nucleic Acid
cttgctaaggctagctacaacgaactgtagt

SEQ ID NO: 16970 - DNA, 31 bp, Artificial Sequence
  Description of Artificial Sequence:  Enzymatic Nucleic Acid
tttgcttgggctagctacaacgataatactg

SEQ ID NO: 16971 - DNA, 31 bp, Artificial Sequence
  Description of Artificial Sequence:  Enzymatic Nucleic Acid
attttttgggctagctacaacgattgctaat

SEQ ID NO: 16972 - DNA, 31 bp, Artificial Sequence
  Description of Artificial Sequence:  Enzymatic Nucleic Acid
gatggccaggctagctacaacgatttttgct

SEQ ID NO: 16973 - DNA, 31 bp, Artificial Sequence
  Description of Artificial Sequence:  Enzymatic Nucleic Acid
agtgatggggctagctacaacgacatttttt

SEQ ID NO: 16974 - DNA, 31 bp, Artificial Sequence
  Description of Artificial Sequence:  Enzymatic Nucleic Acid
cttagtgaggctagctacaacgaggccattt

SEQ ID NO: 16975 - DNA, 31 bp, Artificial Sequence
  Description of Artificial Sequence:  Enzymatic Nucleic Acid
ctccttagggctagctacaacgagatggcca

SEQ ID NO: 16976 - DNA, 31 bp, Artificial Sequence
  Description of Artificial Sequence:  Enzymatic Nucleic Acid
atggagtgggctagctacaacgatccttagt

SEQ ID NO: 16977 - DNA, 31 bp, Artificial Sequence
  Description of Artificial Sequence:  Enzymatic Nucleic Acid
tgatggagggctagctacaacgagctcctta

SEQ ID NO: 16978 - DNA, 31 bp, Artificial Sequence
  Description of Artificial Sequence:  Enzymatic Nucleic Acid
aagagtgaggctagctacaacgaggagtgct

SEQ ID NO: 16979 - DNA, 31 bp, Artificial Sequence
  Description of Artificial Sequence:  Enzymatic Nucleic Acid
attaagagggctagctacaacgagatggagt

SEQ ID NO: 16980 - DNA, 31 bp, Artificial Sequence
  Description of Artificial Sequence:  Enzymatic Nucleic Acid
tggtaagaggctagctacaacgataagagtg

SEQ ID NO: 16981 - DNA, 31 bp, Artificial Sequence
  Description of Artificial Sequence:  Enzymatic Nucleic Acid
catgatggggctagctacaacgaaagattaa

SEQ ID NO: 16982 - DNA, 31 bp, Artificial Sequence
  Description of Artificial Sequence:  Enzymatic Nucleic Acid
attcatgaggctagctacaacgaggtaagat

SEQ ID NO: 16983 - DNA, 31 bp, Artificial Sequence
  Description of Artificial Sequence:  Enzymatic Nucleic Acid
aacattcaggctagctacaacgagatggtaa

SEQ ID NO: 16984 - DNA, 31 bp, Artificial Sequence
  Description of Artificial Sequence:  Enzymatic Nucleic Acid
gggaaacaggctagctacaacgatcatgatg

SEQ ID NO: 16985 - DNA, 31 bp, Artificial Sequence
  Description of Artificial Sequence:  Enzymatic Nucleic Acid
cagggaaaggctagctacaacgaattcatga

SEQ ID NO: 16986 - DNA, 31 bp, Artificial Sequence
  Description of Artificial Sequence:  Enzymatic Nucleic Acid
gaatcttgggctagctacaacgaagggaaac

SEQ ID NO: 16987 - DNA, 31 bp, Artificial Sequence
  Description of Artificial Sequence:  Enzymatic Nucleic Acid
tgcctgaaggctagctacaacgacttgcagg

SEQ ID NO: 16988 - DNA, 31 bp, Artificial Sequence
  Description of Artificial Sequence:  Enzymatic Nucleic Acid
cataggtgggctagctacaacgactgaatct

SEQ ID NO: 16989 - DNA, 31 bp, Artificial Sequence
  Description of Artificial Sequence:  Enzymatic Nucleic Acid
ggcataggggctagctacaacgagcctgaat

SEQ ID NO: 16990 - DNA, 31 bp, Artificial Sequence
  Description of Artificial Sequence:  Enzymatic Nucleic Acid
tgcaggcaggctagctacaacgaaggtgcct

SEQ ID NO: 16991 - DNA, 31 bp, Artificial Sequence
  Description of Artificial Sequence:  Enzymatic Nucleic Acid
tctgcaggggctagctacaacgaataggtgc

SEQ ID NO: 16992 - DNA, 31 bp, Artificial Sequence
  Description of Artificial Sequence:  Enzymatic Nucleic Acid
tggctctgggctagctacaacgaaggcatag

SEQ ID NO: 16993 - DNA, 31 bp, Artificial Sequence
  Description of Artificial Sequence:  Enzymatic Nucleic Acid
attcctggggctagctacaacgatctgcagg

SEQ ID NO: 16994 - DNA, 31 bp, Artificial Sequence
  Description of Artificial Sequence:  Enzymatic Nucleic Acid
tgtatacaggctagctacaacgatcctggct

SEQ ID NO: 16995 - DNA, 31 bp, Artificial Sequence
  Description of Artificial Sequence:  Enzymatic Nucleic Acid
tgtgtataggctagctacaacgaattcctgg

SEQ ID NO: 16996 - DNA, 31 bp, Artificial Sequence
  Description of Artificial Sequence:  Enzymatic Nucleic Acid
cctgtgtaggctagctacaacgaacattcct

SEQ ID NO: 16997 - DNA, 31 bp, Artificial Sequence
  Description of Artificial Sequence:  Enzymatic Nucleic Acid
cccctgtgggctagctacaacgaatacattc

SEQ ID NO: 16998 - DNA, 31 bp, Artificial Sequence
  Description of Artificial Sequence:  Enzymatic Nucleic Acid
ttcccctgggctagctacaacgagtatacat

SEQ ID NO: 16999 - DNA, 31 bp, Artificial Sequence
  Description of Artificial Sequence:  Enzymatic Nucleic Acid
ctggaggaggctagctacaacgattcttccc

SEQ ID NO: 17000 - DNA, 31 bp, Artificial Sequence
  Description of Artificial Sequence:  Enzymatic Nucleic Acid
gattgtaaggctagctacaacgattctttct

SEQ ID NO: 17001 - DNA, 31 bp, Artificial Sequence
  Description of Artificial Sequence:  Enzymatic Nucleic Acid
tctgattgggctagctacaacgaaatttctt

SEQ ID NO: 17002 - DNA, 31 bp, Artificial Sequence
  Description of Artificial Sequence:  Enzymatic Nucleic Acid
atctctgaggctagctacaacgatgtaattt

SEQ ID NO: 17003 - DNA, 31 bp, Artificial Sequence
  Description of Artificial Sequence:  Enzymatic Nucleic Acid
cttcctgaggctagctacaacgactctgatt

SEQ ID NO: 17004 - DNA, 31 bp, Artificial Sequence
  Description of Artificial Sequence:  Enzymatic Nucleic Acid
gtatggtgggctagctacaacgattcctgat

SEQ ID NO: 17005 - DNA, 31 bp, Artificial Sequence
  Description of Artificial Sequence:  Enzymatic Nucleic Acid
aggtatggggctagctacaacgagcttcctg

SEQ ID NO: 17006 - DNA, 31 bp, Artificial Sequence
  Description of Artificial Sequence:  Enzymatic Nucleic Acid
aggaggtaggctagctacaacgaggtgcttc

SEQ ID NO: 17007 - DNA, 31 bp, Artificial Sequence
  Description of Artificial Sequence:  Enzymatic Nucleic Acid
gcaggaggggctagctacaacgaatggtgct

SEQ ID NO: 17008 - DNA, 31 bp, Artificial Sequence
  Description of Artificial Sequence:  Enzymatic Nucleic Acid
aggtttcgggctagctacaacgaaggaggta

SEQ ID NO: 17009 - DNA, 31 bp, Artificial Sequence
  Description of Artificial Sequence:  Enzymatic Nucleic Acid
cactgaggggctagctacaacgattcgcagg

SEQ ID NO: 17010 - DNA, 31 bp, Artificial Sequence
  Description of Artificial Sequence:  Enzymatic Nucleic Acid
tgtgatcaggctagctacaacgatgaggttt

SEQ ID NO: 17011 - DNA, 31 bp, Artificial Sequence
  Description of Artificial Sequence:  Enzymatic Nucleic Acid
ctgtgtgaggctagctacaacgacactgagg

SEQ ID NO: 17012 - DNA, 31 bp, Artificial Sequence
  Description of Artificial Sequence:  Enzymatic Nucleic Acid
ccactgtgggctagctacaacgagatcactg

SEQ ID NO: 17013 - DNA, 31 bp, Artificial Sequence
  Description of Artificial Sequence:  Enzymatic Nucleic Acid
ggccactgggctagctacaacgagtgatcac

SEQ ID NO: 17014 - DNA, 31 bp, Artificial Sequence
  Description of Artificial Sequence:  Enzymatic Nucleic Acid
gatggccaggctagctacaacgatgtgtgat

SEQ ID NO: 17015 - DNA, 31 bp, Artificial Sequence
  Description of Artificial Sequence:  Enzymatic Nucleic Acid
gctgatggggctagctacaacgacactgtgt

SEQ ID NO: 17016 - DNA, 31 bp, Artificial Sequence
  Description of Artificial Sequence:  Enzymatic Nucleic Acid
actgctgaggctagctacaacgaggccactg

SEQ ID NO: 17017 - DNA, 31 bp, Artificial Sequence
  Description of Artificial Sequence:  Enzymatic Nucleic Acid
tggaactgggctagctacaacgatgatggcc

SEQ ID NO: 17018 - DNA, 31 bp, Artificial Sequence
  Description of Artificial Sequence:  Enzymatic Nucleic Acid
tggtggaaggctagctacaacgatgctgatg

SEQ ID NO: 17019 - DNA, 31 bp, Artificial Sequence
  Description of Artificial Sequence:  Enzymatic Nucleic Acid
taaagtggggctagctacaacgaggaactgc

SEQ ID NO: 17020 - DNA, 31 bp, Artificial Sequence
  Description of Artificial Sequence:  Enzymatic Nucleic Acid
gtctaaagggctagctacaacgaggtggaac

SEQ ID NO: 17021 - DNA, 31 bp, Artificial Sequence
  Description of Artificial Sequence:  Enzymatic Nucleic Acid
catgacagggctagctacaacgactaaagtg

SEQ ID NO: 17022 - DNA, 31 bp, Artificial Sequence
  Description of Artificial Sequence:  Enzymatic Nucleic Acid
tagcatgaggctagctacaacgaagtctaaa

SEQ ID NO: 17023 - DNA, 31 bp, Artificial Sequence
  Description of Artificial Sequence:  Enzymatic Nucleic Acid
cattagcaggctagctacaacgagacagtct

SEQ ID NO: 17024 - DNA, 31 bp, Artificial Sequence
  Description of Artificial Sequence:  Enzymatic Nucleic Acid
accattagggctagctacaacgaatgacagt

SEQ ID NO: 17025 - DNA, 31 bp, Artificial Sequence
  Description of Artificial Sequence:  Enzymatic Nucleic Acid
ggacaccaggctagctacaacgatagcatga

SEQ ID NO: 17026 - DNA, 31 bp, Artificial Sequence
  Description of Artificial Sequence:  Enzymatic Nucleic Acid
cggggacaggctagctacaacgacattagca

SEQ ID NO: 17027 - DNA, 31 bp, Artificial Sequence
  Description of Artificial Sequence:  Enzymatic Nucleic Acid
ctcggggaggctagctacaacgaaccattag

SEQ ID NO: 17028 - DNA, 31 bp, Artificial Sequence
  Description of Artificial Sequence:  Enzymatic Nucleic Acid
atctgaggggctagctacaacgatcggggac

SEQ ID NO: 17029 - DNA, 31 bp, Artificial Sequence
  Description of Artificial Sequence:  Enzymatic Nucleic Acid
ccaagtgaggctagctacaacgactgaggct

SEQ ID NO: 17030 - DNA, 31 bp, Artificial Sequence
  Description of Artificial Sequence:  Enzymatic Nucleic Acid
aaaccaagggctagctacaacgagatctgag

SEQ ID NO: 17031 - DNA, 31 bp, Artificial Sequence
  Description of Artificial Sequence:  Enzymatic Nucleic Acid
tttttaaaggctagctacaacgacaagtgat

SEQ ID NO: 17032 - DNA, 31 bp, Artificial Sequence
  Description of Artificial Sequence:  Enzymatic Nucleic Acid
tgtggttgggctagctacaacgattttaaac

SEQ ID NO: 17033 - DNA, 31 bp, Artificial Sequence
  Description of Artificial Sequence:  Enzymatic Nucleic Acid
ttttgtggggctagctacaacgatgttttta

SEQ ID NO: 17034 - DNA, 31 bp, Artificial Sequence
  Description of Artificial Sequence:  Enzymatic Nucleic Acid
gtattttgggctagctacaacgaggttgttt

SEQ ID NO: 17035 - DNA, 31 bp, Artificial Sequence
  Description of Artificial Sequence:  Enzymatic Nucleic Acid
ttgttgtaggctagctacaacgatttgtggt

SEQ ID NO: 17036 - DNA, 31 bp, Artificial Sequence
  Description of Artificial Sequence:  Enzymatic Nucleic Acid
tcttgttgggctagctacaacgaattttgtg

SEQ ID NO: 17037 - DNA, 31 bp, Artificial Sequence
  Description of Artificial Sequence:  Enzymatic Nucleic Acid
ggctcttgggctagctacaacgatgtatttt

SEQ ID NO: 17038 - DNA, 31 bp, Artificial Sequence
  Description of Artificial Sequence:  Enzymatic Nucleic Acid
attccaggggctagctacaacgatcttgttg

SEQ ID NO: 17039 - DNA, 31 bp, Artificial Sequence
  Description of Artificial Sequence:  Enzymatic Nucleic Acid
taaaataaggctagctacaacgatccaggct

SEQ ID NO: 17040 - DNA, 31 bp, Artificial Sequence
  Description of Artificial Sequence:  Enzymatic Nucleic Acid
tcctaaaaggctagctacaacgaaattccag

SEQ ID NO: 17041 - DNA, 31 bp, Artificial Sequence
  Description of Artificial Sequence:  Enzymatic Nucleic Acid
cttcctggggctagctacaacgacctaaaat

SEQ ID NO: 17042 - DNA, 31 bp, Artificial Sequence
  Description of Artificial Sequence:  Enzymatic Nucleic Acid
gcgtgctgggctagctacaacgattcctggt

SEQ ID NO: 17043 - DNA, 31 bp, Artificial Sequence
  Description of Artificial Sequence:  Enzymatic Nucleic Acid
acagcgtgggctagctacaacgatgcttcct

SEQ ID NO: 17044 - DNA, 31 bp, Artificial Sequence
  Description of Artificial Sequence:  Enzymatic Nucleic Acid
aaacagcgggctagctacaacgagctgcttc

SEQ ID NO: 17045 - DNA, 31 bp, Artificial Sequence
  Description of Artificial Sequence:  Enzymatic Nucleic Acid
ataaacagggctagctacaacgagtgctgct

SEQ ID NO: 17046 - DNA, 31 bp, Artificial Sequence
  Description of Artificial Sequence:  Enzymatic Nucleic Acid
tcaataaaggctagctacaacgaagcgtgct

SEQ ID NO: 17047 - DNA, 31 bp, Artificial Sequence
  Description of Artificial Sequence:  Enzymatic Nucleic Acid
tctttcaaggctagctacaacgaaaacagcg

SEQ ID NO: 17048 - DNA, 31 bp, Artificial Sequence
  Description of Artificial Sequence:  Enzymatic Nucleic Acid
ttctgtgaggctagctacaacgatctttcaa

SEQ ID NO: 17049 - DNA, 31 bp, Artificial Sequence
  Description of Artificial Sequence:  Enzymatic Nucleic Acid
ctcttctgggctagctacaacgagactcttt

SEQ ID NO: 17050 - DNA, 31 bp, Artificial Sequence
  Description of Artificial Sequence:  Enzymatic Nucleic Acid
caccttcaggctagctacaacgacctcttct

SEQ ID NO: 17051 - DNA, 31 bp, Artificial Sequence
  Description of Artificial Sequence:  Enzymatic Nucleic Acid
gatagacaggctagctacaacgacttcatcc

SEQ ID NO: 17052 - DNA, 31 bp, Artificial Sequence
  Description of Artificial Sequence:  Enzymatic Nucleic Acid
gtgatagaggctagctacaacgaaccttcat

SEQ ID NO: 17053 - DNA, 31 bp, Artificial Sequence
  Description of Artificial Sequence:  Enzymatic Nucleic Acid
tgcagtgaggctagctacaacgaagacacct

SEQ ID NO: 17054 - DNA, 31 bp, Artificial Sequence
  Description of Artificial Sequence:  Enzymatic Nucleic Acid
ctttgcagggctagctacaacgagatagaca

SEQ ID NO: 17055 - DNA, 31 bp, Artificial Sequence
  Description of Artificial Sequence:  Enzymatic Nucleic Acid
tggctttgggctagctacaacgaagtgatag

SEQ ID NO: 17056 - DNA, 31 bp, Artificial Sequence
  Description of Artificial Sequence:  Enzymatic Nucleic Acid
gttggtggggctagctacaacgatttgcagt

SEQ ID NO: 17057 - DNA, 31 bp, Artificial Sequence
  Description of Artificial Sequence:  Enzymatic Nucleic Acid
ctggttggggctagctacaacgaggctttgc

SEQ ID NO: 17058 - DNA, 31 bp, Artificial Sequence
  Description of Artificial Sequence:  Enzymatic Nucleic Acid
ccttctggggctagctacaacgatggtggct

SEQ ID NO: 17059 - DNA, 31 bp, Artificial Sequence
  Description of Artificial Sequence:  Enzymatic Nucleic Acid
ccacagagggctagctacaacgaccttctgg

SEQ ID NO: 17060 - DNA, 31 bp, Artificial Sequence
  Description of Artificial Sequence:  Enzymatic Nucleic Acid
actttccaggctagctacaacgaagagccct

SEQ ID NO: 17061 - DNA, 31 bp, Artificial Sequence
  Description of Artificial Sequence:  Enzymatic Nucleic Acid
atgctgaaggctagctacaacgatttccaca

SEQ ID NO: 17062 - DNA, 31 bp, Artificial Sequence
  Description of Artificial Sequence:  Enzymatic Nucleic Acid
gaggtatgggctagctacaacgatgaacttt

SEQ ID NO: 17063 - DNA, 31 bp, Artificial Sequence
  Description of Artificial Sequence:  Enzymatic Nucleic Acid
gtgaggtaggctagctacaacgagctgaact

SEQ ID NO: 17064 - DNA, 31 bp, Artificial Sequence
  Description of Artificial Sequence:  Enzymatic Nucleic Acid
cagtgaggggctagctacaacgaatgctgaa

SEQ ID NO: 17065 - DNA, 31 bp, Artificial Sequence
  Description of Artificial Sequence:  Enzymatic Nucleic Acid
ttgaacagggctagctacaacgagaggtatg

SEQ ID NO: 17066 - DNA, 31 bp, Artificial Sequence
  Description of Artificial Sequence:  Enzymatic Nucleic Acid
tccttgaaggctagctacaacgaagtgaggt

SEQ ID NO: 17067 - DNA, 31 bp, Artificial Sequence
  Description of Artificial Sequence:  Enzymatic Nucleic Acid
gtccgaggggctagctacaacgatccttgaa

SEQ ID NO: 17068 - DNA, 31 bp, Artificial Sequence
  Description of Artificial Sequence:  Enzymatic Nucleic Acid
tagacttgggctagctacaacgaccgaggtt

SEQ ID NO: 17069 - DNA, 31 bp, Artificial Sequence
  Description of Artificial Sequence:  Enzymatic Nucleic Acid
agattagaggctagctacaacgattgtccga

SEQ ID NO: 17070 - DNA, 31 bp, Artificial Sequence
  Description of Artificial Sequence:  Enzymatic Nucleic Acid
gctccagaggctagctacaacgatagacttg

SEQ ID NO: 17071 - DNA, 31 bp, Artificial Sequence
  Description of Artificial Sequence:  Enzymatic Nucleic Acid
gtgatcagggctagctacaacgatccagatt

SEQ ID NO: 17072 - DNA, 31 bp, Artificial Sequence
  Description of Artificial Sequence:  Enzymatic Nucleic Acid
tagagtgaggctagctacaacgacagctcca

SEQ ID NO: 17073 - DNA, 31 bp, Artificial Sequence
  Description of Artificial Sequence:  Enzymatic Nucleic Acid
tgttagagggctagctacaacgagatcagct

SEQ ID NO: 17074 - DNA, 31 bp, Artificial Sequence
  Description of Artificial Sequence:  Enzymatic Nucleic Acid
ggtgcatgggctagctacaacgatagagtga

SEQ ID NO: 17075 - DNA, 31 bp, Artificial Sequence
  Description of Artificial Sequence:  Enzymatic Nucleic Acid
caggtgcaggctagctacaacgagttagagt

SEQ ID NO: 17076 - DNA, 31 bp, Artificial Sequence
  Description of Artificial Sequence:  Enzymatic Nucleic Acid
cacaggtgggctagctacaacgaatgttaga

SEQ ID NO: 17077 - DNA, 31 bp, Artificial Sequence
  Description of Artificial Sequence:  Enzymatic Nucleic Acid
cacacaggggctagctacaacgagcatgtta

SEQ ID NO: 17078 - DNA, 31 bp, Artificial Sequence
  Description of Artificial Sequence:  Enzymatic Nucleic Acid
cagccacaggctagctacaacgaaggtgcat

SEQ ID NO: 17079 - DNA, 31 bp, Artificial Sequence
  Description of Artificial Sequence:  Enzymatic Nucleic Acid
cgcagccaggctagctacaacgaacaggtgc

SEQ ID NO: 17080 - DNA, 31 bp, Artificial Sequence
  Description of Artificial Sequence:  Enzymatic Nucleic Acid
agtcgcagggctagctacaacgacacacagg

SEQ ID NO: 17081 - DNA, 31 bp, Artificial Sequence
  Description of Artificial Sequence:  Enzymatic Nucleic Acid
gagagtcgggctagctacaacgaagccacac

SEQ ID NO: 17082 - DNA, 31 bp, Artificial Sequence
  Description of Artificial Sequence:  Enzymatic Nucleic Acid
gaagagagggctagctacaacgacgcagcca

SEQ ID NO: 17083 - DNA, 31 bp, Artificial Sequence
  Description of Artificial Sequence:  Enzymatic Nucleic Acid
aataggagggctagctacaacgacagaagag

SEQ ID NO: 17084 - DNA, 31 bp, Artificial Sequence
  Description of Artificial Sequence:  Enzymatic Nucleic Acid
agggttaaggctagctacaacgaaggagcca

SEQ ID NO: 17085 - DNA, 31 bp, Artificial Sequence
  Description of Artificial Sequence:  Enzymatic Nucleic Acid
aaggagggggctagctacaacgataatagga

SEQ ID NO: 17086 - DNA, 31 bp, Artificial Sequence
  Description of Artificial Sequence:  Enzymatic Nucleic Acid
ttttcggaggctagctacaacgaaaggaggg

SEQ ID NO: 17087 - DNA, 31 bp, Artificial Sequence
  Description of Artificial Sequence:  Enzymatic Nucleic Acid
ccttttcaggctagctacaacgattttcgga

SEQ ID NO: 17088 - DNA, 31 bp, Artificial Sequence
  Description of Artificial Sequence:  Enzymatic Nucleic Acid
gaagaagaggctagctacaacgacttttcat

SEQ ID NO: 17089 - DNA, 31 bp, Artificial Sequence
  Description of Artificial Sequence:  Enzymatic Nucleic Acid
agtctttaggctagctacaacgattcagaag

SEQ ID NO: 17090 - DNA, 31 bp, Artificial Sequence
  Description of Artificial Sequence:  Enzymatic Nucleic Acid
gtagtcagggctagctacaacgactttattt

SEQ ID NO: 17091 - DNA, 31 bp, Artificial Sequence
  Description of Artificial Sequence:  Enzymatic Nucleic Acid
ataggtagggctagctacaacgacagtcttt

SEQ ID NO: 17092 - DNA, 31 bp, Artificial Sequence
  Description of Artificial Sequence:  Enzymatic Nucleic Acid
ttgataggggctagctacaacgaagtcagtc

SEQ ID NO: 17093 - DNA, 31 bp, Artificial Sequence
  Description of Artificial Sequence:  Enzymatic Nucleic Acid
ataattgaggctagctacaacgaaggtagtc

SEQ ID NO: 17094 - DNA, 31 bp, Artificial Sequence
  Description of Artificial Sequence:  Enzymatic Nucleic Acid
cattataaggctagctacaacgatgataggt

SEQ ID NO: 17095 - DNA, 31 bp, Artificial Sequence
  Description of Artificial Sequence:  Enzymatic Nucleic Acid
gtccattaggctagctacaacgaaattgata

SEQ ID NO: 17096 - DNA, 31 bp, Artificial Sequence
  Description of Artificial Sequence:  Enzymatic Nucleic Acid
tgggtccaggctagctacaacgatataattg

SEQ ID NO: 17097 - DNA, 31 bp, Artificial Sequence
  Description of Artificial Sequence:  Enzymatic Nucleic Acid
catctgggggctagctacaacgaccattata

SEQ ID NO: 17098 - DNA, 31 bp, Artificial Sequence
  Description of Artificial Sequence:  Enzymatic Nucleic Acid
gaacttcaggctagctacaacgactgggtcc

SEQ ID NO: 17099 - DNA, 31 bp, Artificial Sequence
  Description of Artificial Sequence:  Enzymatic Nucleic Acid
caaaggaaggctagctacaacgattcatctg

SEQ ID NO: 17100 - DNA, 31 bp, Artificial Sequence
  Description of Artificial Sequence:  Enzymatic Nucleic Acid
actgctcaggctagctacaacgaccaaagga

SEQ ID NO: 17101 - DNA, 31 bp, Artificial Sequence
  Description of Artificial Sequence:  Enzymatic Nucleic Acid
tcacactgggctagctacaacgatcatccaa

SEQ ID NO: 17102 - DNA, 31 bp, Artificial Sequence
  Description of Artificial Sequence:  Enzymatic Nucleic Acid
cgctcacaggctagctacaacgatgctcatc

SEQ ID NO: 17103 - DNA, 31 bp, Artificial Sequence
  Description of Artificial Sequence:  Enzymatic Nucleic Acid
gccgctcaggctagctacaacgaactgctca

SEQ ID NO: 17104 - DNA, 31 bp, Artificial Sequence
  Description of Artificial Sequence:  Enzymatic Nucleic Acid
gggagccgggctagctacaacgatcacactg

SEQ ID NO: 17105 - DNA, 31 bp, Artificial Sequence
  Description of Artificial Sequence:  Enzymatic Nucleic Acid
taagggagggctagctacaacgacgctcaca

SEQ ID NO: 17106 - DNA, 31 bp, Artificial Sequence
  Description of Artificial Sequence:  Enzymatic Nucleic Acid
tggcatcaggctagctacaacgaaagggagc

SEQ ID NO: 17107 - DNA, 31 bp, Artificial Sequence
  Description of Artificial Sequence:  Enzymatic Nucleic Acid
tgctggcaggctagctacaacgacataaggg

SEQ ID NO: 17108 - DNA, 31 bp, Artificial Sequence
  Description of Artificial Sequence:  Enzymatic Nucleic Acid
cttgctggggctagctacaacgaatcataag

SEQ ID NO: 17109 - DNA, 31 bp, Artificial Sequence
  Description of Artificial Sequence:  Enzymatic Nucleic Acid
cccacttgggctagctacaacgatggcatca

SEQ ID NO: 17110 - DNA, 31 bp, Artificial Sequence
  Description of Artificial Sequence:  Enzymatic Nucleic Acid
aactcccaggctagctacaacgattgctggc

SEQ ID NO: 17111 - DNA, 31 bp, Artificial Sequence
  Description of Artificial Sequence:  Enzymatic Nucleic Acid
cgggcaaaggctagctacaacgatcccactt

SEQ ID NO: 17112 - DNA, 31 bp, Artificial Sequence
  Description of Artificial Sequence:  Enzymatic Nucleic Acid
ctcccgggggctagctacaacgaaaactccc

SEQ ID NO: 17113 - DNA, 31 bp, Artificial Sequence
  Description of Artificial Sequence:  Enzymatic Nucleic Acid
agtttaagggctagctacaacgactctcccg

SEQ ID NO: 17114 - DNA, 31 bp, Artificial Sequence
  Description of Artificial Sequence:  Enzymatic Nucleic Acid
ttgcccagggctagctacaacgattaagtct

SEQ ID NO: 17115 - DNA, 31 bp, Artificial Sequence
  Description of Artificial Sequence:  Enzymatic Nucleic Acid
gtgatttgggctagctacaacgaccagttta

SEQ ID NO: 17116 - DNA, 31 bp, Artificial Sequence
  Description of Artificial Sequence:  Enzymatic Nucleic Acid
ccaagtgaggctagctacaacgattgcccag

SEQ ID NO: 17117 - DNA, 31 bp, Artificial Sequence
  Description of Artificial Sequence:  Enzymatic Nucleic Acid
cttccaagggctagctacaacgagatttgcc

SEQ ID NO: 17118 - DNA, 31 bp, Artificial Sequence
  Description of Artificial Sequence:  Enzymatic Nucleic Acid
tccaaaagggctagctacaacgaccctcttc

SEQ ID NO: 17119 - DNA, 31 bp, Artificial Sequence
  Description of Artificial Sequence:  Enzymatic Nucleic Acid
ttgaaccaggctagctacaacgattttccaa

SEQ ID NO: 17120 - DNA, 31 bp, Artificial Sequence
  Description of Artificial Sequence:  Enzymatic Nucleic Acid
tgcttgaaggctagctacaacgacacttttc

SEQ ID NO: 17121 - DNA, 31 bp, Artificial Sequence
  Description of Artificial Sequence:  Enzymatic Nucleic Acid
tgctgatgggctagctacaacgattgaacca

SEQ ID NO: 17122 - DNA, 31 bp, Artificial Sequence
  Description of Artificial Sequence:  Enzymatic Nucleic Acid
aatgctgaggctagctacaacgagcttgaac

SEQ ID NO: 17123 - DNA, 31 bp, Artificial Sequence
  Description of Artificial Sequence:  Enzymatic Nucleic Acid
gccaaatgggctagctacaacgatgatgctt

SEQ ID NO: 17124 - DNA, 31 bp, Artificial Sequence
  Description of Artificial Sequence:  Enzymatic Nucleic Acid
atgccaaaggctagctacaacgagctgatgc

SEQ ID NO: 17125 - DNA, 31 bp, Artificial Sequence
  Description of Artificial Sequence:  Enzymatic Nucleic Acid
tcttaatgggctagctacaacgacaaatgct

SEQ ID NO: 17126 - DNA, 31 bp, Artificial Sequence
  Description of Artificial Sequence:  Enzymatic Nucleic Acid
tttcttaaggctagctacaacgagccaaatg

SEQ ID NO: 17127 - DNA, 31 bp, Artificial Sequence
  Description of Artificial Sequence:  Enzymatic Nucleic Acid
gtaggtgaggctagctacaacgattcttaat

SEQ ID NO: 17128 - DNA, 31 bp, Artificial Sequence
  Description of Artificial Sequence:  Enzymatic Nucleic Acid
cacgtaggggctagctacaacgagatttctt

SEQ ID NO: 17129 - DNA, 31 bp, Artificial Sequence
  Description of Artificial Sequence:  Enzymatic Nucleic Acid
ccggcacgggctagctacaacgaaggtgatt

SEQ ID NO: 17130 - DNA, 31 bp, Artificial Sequence
  Description of Artificial Sequence:  Enzymatic Nucleic Acid
gtccggcaggctagctacaacgagtaggtga

SEQ ID NO: 17131 - DNA, 31 bp, Artificial Sequence
  Description of Artificial Sequence:  Enzymatic Nucleic Acid
cagtccggggctagctacaacgaacgtaggt

SEQ ID NO: 17132 - DNA, 31 bp, Artificial Sequence
  Description of Artificial Sequence:  Enzymatic Nucleic Acid
agccacagggctagctacaacgaccggcacg

SEQ ID NO: 17133 - DNA, 31 bp, Artificial Sequence
  Description of Artificial Sequence:  Enzymatic Nucleic Acid
cacagccaggctagctacaacgaagtccggc

SEQ ID NO: 17134 - DNA, 31 bp, Artificial Sequence
  Description of Artificial Sequence:  Enzymatic Nucleic Acid
tttcacagggctagctacaacgacacagtcc

SEQ ID NO: 17135 - DNA, 31 bp, Artificial Sequence
  Description of Artificial Sequence:  Enzymatic Nucleic Acid
cattttcaggctagctacaacgaagccacag

SEQ ID NO: 17136 - DNA, 31 bp, Artificial Sequence
  Description of Artificial Sequence:  Enzymatic Nucleic Acid
tttcagcaggctagctacaacgatttcacag

SEQ ID NO: 17137 - DNA, 31 bp, Artificial Sequence
  Description of Artificial Sequence:  Enzymatic Nucleic Acid
tctttcagggctagctacaacgaattttcac

SEQ ID NO: 17138 - DNA, 31 bp, Artificial Sequence
  Description of Artificial Sequence:  Enzymatic Nucleic Acid
ggccgtggggctagctacaacgacccctctt

SEQ ID NO: 17139 - DNA, 31 bp, Artificial Sequence
  Description of Artificial Sequence:  Enzymatic Nucleic Acid
gctggccgggctagctacaacgaggccccct

SEQ ID NO: 17140 - DNA, 31 bp, Artificial Sequence
  Description of Artificial Sequence:  Enzymatic Nucleic Acid
ctcgctggggctagctacaacgacgtggccc

SEQ ID NO: 17141 - DNA, 31 bp, Artificial Sequence
  Description of Artificial Sequence:  Enzymatic Nucleic Acid
tgtactcgggctagctacaacgatggccgtg

SEQ ID NO: 17142 - DNA, 31 bp, Artificial Sequence
  Description of Artificial Sequence:  Enzymatic Nucleic Acid
gctttgtaggctagctacaacgatcgctggc

SEQ ID NO: 17143 - DNA, 31 bp, Artificial Sequence
  Description of Artificial Sequence:  Enzymatic Nucleic Acid
gagctttgggctagctacaacgaactcgctg

SEQ ID NO: 17144 - DNA, 31 bp, Artificial Sequence
  Description of Artificial Sequence:  Enzymatic Nucleic Acid
catcagagggctagctacaacgatttgtact

SEQ ID NO: 17145 - DNA, 31 bp, Artificial Sequence
  Description of Artificial Sequence:  Enzymatic Nucleic Acid
ctcagtcaggctagctacaacgacagagctt

SEQ ID NO: 17146 - DNA, 31 bp, Artificial Sequence
  Description of Artificial Sequence:  Enzymatic Nucleic Acid
tagctcagggctagctacaacgacatcagag

SEQ ID NO: 17147 - DNA, 31 bp, Artificial Sequence
  Description of Artificial Sequence:  Enzymatic Nucleic Acid
atttttagggctagctacaacgatcagtcat

SEQ ID NO: 17148 - DNA, 31 bp, Artificial Sequence
  Description of Artificial Sequence:  Enzymatic Nucleic Acid
ggtcaagaggctagctacaacgattttagct

SEQ ID NO: 17149 - DNA, 31 bp, Artificial Sequence
  Description of Artificial Sequence:  Enzymatic Nucleic Acid
aatgtgggggctagctacaacgacaagattt

SEQ ID NO: 17150 - DNA, 31 bp, Artificial Sequence
  Description of Artificial Sequence:  Enzymatic Nucleic Acid
ggccaatgggctagctacaacgagggtcaag

SEQ ID NO: 17151 - DNA, 31 bp, Artificial Sequence
  Description of Artificial Sequence:  Enzymatic Nucleic Acid
gtggccaaggctagctacaacgagtgggtca

SEQ ID NO: 17152 - DNA, 31 bp, Artificial Sequence
  Description of Artificial Sequence:  Enzymatic Nucleic Acid
gatggtggggctagctacaacgacaatgtgg

SEQ ID NO: 17153 - DNA, 31 bp, Artificial Sequence
  Description of Artificial Sequence:  Enzymatic Nucleic Acid
tcagatggggctagctacaacgaggccaatg

SEQ ID NO: 17154 - DNA, 31 bp, Artificial Sequence
  Description of Artificial Sequence:  Enzymatic Nucleic Acid
cgttcagaggctagctacaacgaggtggcca

SEQ ID NO: 17155 - DNA, 31 bp, Artificial Sequence
  Description of Artificial Sequence:  Enzymatic Nucleic Acid
taaccacgggctagctacaacgatcagatgg

SEQ ID NO: 17156 - DNA, 31 bp, Artificial Sequence
  Description of Artificial Sequence:  Enzymatic Nucleic Acid
gttaaccaggctagctacaacgagttcagat

SEQ ID NO: 17157 - DNA, 31 bp, Artificial Sequence
  Description of Artificial Sequence:  Enzymatic Nucleic Acid
caggttaaggctagctacaacgacacgttca

SEQ ID NO: 17158 - DNA, 31 bp, Artificial Sequence
  Description of Artificial Sequence:  Enzymatic Nucleic Acid
ccagcaggggctagctacaacgataaccacg

SEQ ID NO: 17159 - DNA, 31 bp, Artificial Sequence
  Description of Artificial Sequence:  Enzymatic Nucleic Acid
gctcccagggctagctacaacgaaggttaac

SEQ ID NO: 17160 - DNA, 31 bp, Artificial Sequence
  Description of Artificial Sequence:  Enzymatic Nucleic Acid
ggtgcaggggctagctacaacgatcccagca

SEQ ID NO: 17161 - DNA, 31 bp, Artificial Sequence
  Description of Artificial Sequence:  Enzymatic Nucleic Acid
gcttggtgggctagctacaacgaaggctccc

SEQ ID NO: 17162 - DNA, 31 bp, Artificial Sequence
  Description of Artificial Sequence:  Enzymatic Nucleic Acid
ttgcttggggctagctacaacgagcaggctc

SEQ ID NO: 17163 - DNA, 31 bp, Artificial Sequence
  Description of Artificial Sequence:  Enzymatic Nucleic Acid
cctccttgggctagctacaacgattggtgca

SEQ ID NO: 17164 - DNA, 31 bp, Artificial Sequence
  Description of Artificial Sequence:  Enzymatic Nucleic Acid
atcagaggggctagctacaacgacctccttg

SEQ ID NO: 17165 - DNA, 31 bp, Artificial Sequence
  Description of Artificial Sequence:  Enzymatic Nucleic Acid
aatcaccaggctagctacaacgacagaggcc

SEQ ID NO: 17166 - DNA, 31 bp, Artificial Sequence
  Description of Artificial Sequence:  Enzymatic Nucleic Acid
aacaatcaggctagctacaacgacatcagag

SEQ ID NO: 17167 - DNA, 31 bp, Artificial Sequence
  Description of Artificial Sequence:  Enzymatic Nucleic Acid
ttcaacaaggctagctacaacgacaccatca

SEQ ID NO: 17168 - DNA, 31 bp, Artificial Sequence
  Description of Artificial Sequence:  Enzymatic Nucleic Acid
gtattcaaggctagctacaacgaaatcacca

SEQ ID NO: 17169 - DNA, 31 bp, Artificial Sequence
  Description of Artificial Sequence:  Enzymatic Nucleic Acid
ttgcagtaggctagctacaacgatcaacaat

SEQ ID NO: 17170 - DNA, 31 bp, Artificial Sequence
  Description of Artificial Sequence:  Enzymatic Nucleic Acid
atttgcagggctagctacaacgaattcaaca

SEQ ID NO: 17171 - DNA, 31 bp, Artificial Sequence
  Description of Artificial Sequence:  Enzymatic Nucleic Acid
catatttgggctagctacaacgaagtattca

SEQ ID NO: 17172 - DNA, 31 bp, Artificial Sequence
  Description of Artificial Sequence:  Enzymatic Nucleic Acid
tttccataggctagctacaacgattgcagta

SEQ ID NO: 17173 - DNA, 31 bp, Artificial Sequence
  Description of Artificial Sequence:  Enzymatic Nucleic Acid
gatttccaggctagctacaacgaatttgcag

SEQ ID NO: 17174 - DNA, 31 bp, Artificial Sequence
  Description of Artificial Sequence:  Enzymatic Nucleic Acid
tggagagaggctagctacaacgattccatat

SEQ ID NO: 17175 - DNA, 31 bp, Artificial Sequence
  Description of Artificial Sequence:  Enzymatic Nucleic Acid
tgaggtagggctagctacaacgatggagaga

SEQ ID NO: 17176 - DNA, 31 bp, Artificial Sequence
  Description of Artificial Sequence:  Enzymatic Nucleic Acid
tcttgaggggctagctacaacgaagttggag

SEQ ID NO: 17177 - DNA, 31 bp, Artificial Sequence
  Description of Artificial Sequence:  Enzymatic Nucleic Acid
cacgtttgggctagctacaacgatcttgagg

SEQ ID NO: 17178 - DNA, 31 bp, Artificial Sequence
  Description of Artificial Sequence:  Enzymatic Nucleic Acid
aagtcacgggctagctacaacgattgctctt

SEQ ID NO: 17179 - DNA, 31 bp, Artificial Sequence
  Description of Artificial Sequence:  Enzymatic Nucleic Acid
ataagtcaggctagctacaacgagtttgctc

SEQ ID NO: 17180 - DNA, 31 bp, Artificial Sequence
  Description of Artificial Sequence:  Enzymatic Nucleic Acid
aaaataagggctagctacaacgacacgtttg

SEQ ID NO: 17181 - DNA, 31 bp, Artificial Sequence
  Description of Artificial Sequence:  Enzymatic Nucleic Acid
agaaaaaaggctagctacaacgaaagtcacg

SEQ ID NO: 17182 - DNA, 31 bp, Artificial Sequence
  Description of Artificial Sequence:  Enzymatic Nucleic Acid
catccttgggctagctacaacgatgagaaaa

SEQ ID NO: 17183 - DNA, 31 bp, Artificial Sequence
  Description of Artificial Sequence:  Enzymatic Nucleic Acid
gtgctgcaggctagctacaacgaccttgttg

SEQ ID NO: 17184 - DNA, 31 bp, Artificial Sequence
  Description of Artificial Sequence:  Enzymatic Nucleic Acid
tagtgctgggctagctacaacgaatccttgt

SEQ ID NO: 17185 - DNA, 31 bp, Artificial Sequence
  Description of Artificial Sequence:  Enzymatic Nucleic Acid
gtgtagtgggctagctacaacgatgcatcct

SEQ ID NO: 17186 - DNA, 31 bp, Artificial Sequence
  Description of Artificial Sequence:  Enzymatic Nucleic Acid
atgtgtagggctagctacaacgagctgcatc

SEQ ID NO: 17187 - DNA, 31 bp, Artificial Sequence
  Description of Artificial Sequence:  Enzymatic Nucleic Acid
tccatgtgggctagctacaacgaagtgctgc

SEQ ID NO: 17188 - DNA, 31 bp, Artificial Sequence
  Description of Artificial Sequence:  Enzymatic Nucleic Acid
gctccatgggctagctacaacgagtagtgct

SEQ ID NO: 17189 - DNA, 31 bp, Artificial Sequence
  Description of Artificial Sequence:  Enzymatic Nucleic Acid
aggctccaggctagctacaacgagtgtagtg

SEQ ID NO: 17190 - DNA, 31 bp, Artificial Sequence
  Description of Artificial Sequence:  Enzymatic Nucleic Acid
ttcttaggggctagctacaacgatccatgtg

SEQ ID NO: 17191 - DNA, 31 bp, Artificial Sequence
  Description of Artificial Sequence:  Enzymatic Nucleic Acid
tggctccaggctagctacaacgatttttctt

SEQ ID NO: 17192 - DNA, 31 bp, Artificial Sequence
  Description of Artificial Sequence:  Enzymatic Nucleic Acid
aggcctggggctagctacaacgatccatttt

SEQ ID NO: 17193 - DNA, 31 bp, Artificial Sequence
  Description of Artificial Sequence:  Enzymatic Nucleic Acid
gttccaggggctagctacaacgactggctcc

SEQ ID NO: 17194 - DNA, 31 bp, Artificial Sequence
  Description of Artificial Sequence:  Enzymatic Nucleic Acid
ttgccttgggctagctacaacgatccaggcc

SEQ ID NO: 17195 - DNA, 31 bp, Artificial Sequence
  Description of Artificial Sequence:  Enzymatic Nucleic Acid
gtttcttgggctagctacaacgacttgttcc

SEQ ID NO: 17196 - DNA, 31 bp, Artificial Sequence
  Description of Artificial Sequence:  Enzymatic Nucleic Acid
agtcttggggctagctacaacgattcttgcc

SEQ ID NO: 17197 - DNA, 31 bp, Artificial Sequence
  Description of Artificial Sequence:  Enzymatic Nucleic Acid
ctatctagggctagctacaacgacttggttt

SEQ ID NO: 17198 - DNA, 31 bp, Artificial Sequence
  Description of Artificial Sequence:  Enzymatic Nucleic Acid
tgacgctaggctagctacaacgactagtctt

SEQ ID NO: 17199 - DNA, 31 bp, Artificial Sequence
  Description of Artificial Sequence:  Enzymatic Nucleic Acid
tggtgacgggctagctacaacgatatctagt

SEQ ID NO: 17200 - DNA, 31 bp, Artificial Sequence
  Description of Artificial Sequence:  Enzymatic Nucleic Acid
gctggtgaggctagctacaacgagctatcta

SEQ ID NO: 17201 - DNA, 31 bp, Artificial Sequence
  Description of Artificial Sequence:  Enzymatic Nucleic Acid
gctgctggggctagctacaacgagacgctat

SEQ ID NO: 17202 - DNA, 31 bp, Artificial Sequence
  Description of Artificial Sequence:  Enzymatic Nucleic Acid
tttcgctgggctagctacaacgatggtgacg

SEQ ID NO: 17203 - DNA, 31 bp, Artificial Sequence
  Description of Artificial Sequence:  Enzymatic Nucleic Acid
agctttcgggctagctacaacgatgctggtg

SEQ ID NO: 17204 - DNA, 31 bp, Artificial Sequence
  Description of Artificial Sequence:  Enzymatic Nucleic Acid
tcgcaaagggctagctacaacgatttcgctg

SEQ ID NO: 17205 - DNA, 31 bp, Artificial Sequence
  Description of Artificial Sequence:  Enzymatic Nucleic Acid
ggagctcgggctagctacaacgaaaagcttt

SEQ ID NO: 17206 - DNA, 31 bp, Artificial Sequence
  Description of Artificial Sequence:  Enzymatic Nucleic Acid
agccggagggctagctacaacgatcgcaaag

SEQ ID NO: 17207 - DNA, 31 bp, Artificial Sequence
  Description of Artificial Sequence:  Enzymatic Nucleic Acid
cctgaaagggctagctacaacgacggagctc

SEQ ID NO: 17208 - DNA, 31 bp, Artificial Sequence
  Description of Artificial Sequence:  Enzymatic Nucleic Acid
gacttttaggctagctacaacgacttcctga

SEQ ID NO: 17209 - DNA, 31 bp, Artificial Sequence
  Description of Artificial Sequence:  Enzymatic Nucleic Acid
cactcagaggctagctacaacgattttatct

SEQ ID NO: 17210 - DNA, 31 bp, Artificial Sequence
  Description of Artificial Sequence:  Enzymatic Nucleic Acid
caacatcaggctagctacaacgatcagactt

SEQ ID NO: 17211 - DNA, 31 bp, Artificial Sequence
  Description of Artificial Sequence:  Enzymatic Nucleic Acid
cctcaacaggctagctacaacgacactcaga

SEQ ID NO: 17212 - DNA, 31 bp, Artificial Sequence
  Description of Artificial Sequence:  Enzymatic Nucleic Acid
ttcctcaaggctagctacaacgaatcactca

SEQ ID NO: 17213 - DNA, 31 bp, Artificial Sequence
  Description of Artificial Sequence:  Enzymatic Nucleic Acid
cgtcagaaggctagctacaacgacctcctct

SEQ ID NO: 17214 - DNA, 31 bp, Artificial Sequence
  Description of Artificial Sequence:  Enzymatic Nucleic Acid
agaaaccgggctagctacaacgacagaatcc

SEQ ID NO: 17215 - DNA, 31 bp, Artificial Sequence
  Description of Artificial Sequence:  Enzymatic Nucleic Acid
tgtagaaaggctagctacaacgacgtcagaa

SEQ ID NO: 17216 - DNA, 31 bp, Artificial Sequence
  Description of Artificial Sequence:  Enzymatic Nucleic Acid
gctccttgggctagctacaacgaagaaaccg

SEQ ID NO: 17217 - DNA, 31 bp, Artificial Sequence
  Description of Artificial Sequence:  Enzymatic Nucleic Acid
gtgatgggggctagctacaacgatccttgta

SEQ ID NO: 17218 - DNA, 31 bp, Artificial Sequence
  Description of Artificial Sequence:  Enzymatic Nucleic Acid
catagtgaggctagctacaacgagggctcct

SEQ ID NO: 17219 - DNA, 31 bp, Artificial Sequence
  Description of Artificial Sequence:  Enzymatic Nucleic Acid
ttccatagggctagctacaacgagatgggct

SEQ ID NO: 17220 - DNA, 31 bp, Artificial Sequence
  Description of Artificial Sequence:  Enzymatic Nucleic Acid
atcttccaggctagctacaacgaagtgatgg

SEQ ID NO: 17221 - DNA, 31 bp, Artificial Sequence
  Description of Artificial Sequence:  Enzymatic Nucleic Acid
aaatcagaggctagctacaacgacttccata

SEQ ID NO: 17222 - DNA, 31 bp, Artificial Sequence
  Description of Artificial Sequence:  Enzymatic Nucleic Acid
gtaagaaaggctagctacaacgacagatctt

SEQ ID NO: 17223 - DNA, 31 bp, Artificial Sequence
  Description of Artificial Sequence:  Enzymatic Nucleic Acid
gaaaactgggctagctacaacgaaagaaatc

SEQ ID NO: 17224 - DNA, 31 bp, Artificial Sequence
  Description of Artificial Sequence:  Enzymatic Nucleic Acid
cttgaaaaggctagctacaacgatgtaagaa

SEQ ID NO: 17225 - DNA, 31 bp, Artificial Sequence
  Description of Artificial Sequence:  Enzymatic Nucleic Acid
tctggccaggctagctacaacgattgaaaac

SEQ ID NO: 17226 - DNA, 31 bp, Artificial Sequence
  Description of Artificial Sequence:  Enzymatic Nucleic Acid
gcctctggggctagctacaacgacacttgaa

SEQ ID NO: 17227 - DNA, 31 bp, Artificial Sequence
  Description of Artificial Sequence:  Enzymatic Nucleic Acid
actccatgggctagctacaacgactctggcc

SEQ ID NO: 17228 - DNA, 31 bp, Artificial Sequence
  Description of Artificial Sequence:  Enzymatic Nucleic Acid
gaactccaggctagctacaacgagcctctgg

SEQ ID NO: 17229 - DNA, 31 bp, Artificial Sequence
  Description of Artificial Sequence:  Enzymatic Nucleic Acid
gacaggaaggctagctacaacgatccatgcc

SEQ ID NO: 17230 - DNA, 31 bp, Artificial Sequence
  Description of Artificial Sequence:  Enzymatic Nucleic Acid
ctggaagaggctagctacaacgaaggaactc

SEQ ID NO: 17231 - DNA, 31 bp, Artificial Sequence
  Description of Artificial Sequence:  Enzymatic Nucleic Acid
tgaatgcaggctagctacaacgatttctgga

SEQ ID NO: 17232 - DNA, 31 bp, Artificial Sequence
  Description of Artificial Sequence:  Enzymatic Nucleic Acid
gatgaatgggctagctacaacgaactttctg

SEQ ID NO: 17233 - DNA, 31 bp, Artificial Sequence
  Description of Artificial Sequence:  Enzymatic Nucleic Acid
ccgatgaaggctagctacaacgagcactttc

SEQ ID NO: 17234 - DNA, 31 bp, Artificial Sequence
  Description of Artificial Sequence:  Enzymatic Nucleic Acid
ggtcccgaggctagctacaacgagaatgcac

SEQ ID NO: 17235 - DNA, 31 bp, Artificial Sequence
  Description of Artificial Sequence:  Enzymatic Nucleic Acid
ctgccaggggctagctacaacgacccgatga

SEQ ID NO: 17236 - DNA, 31 bp, Artificial Sequence
  Description of Artificial Sequence:  Enzymatic Nucleic Acid
tctcgctgggctagctacaacgacaggtccc

SEQ ID NO: 17237 - DNA, 31 bp, Artificial Sequence
  Description of Artificial Sequence:  Enzymatic Nucleic Acid
gtttctcgggctagctacaacgatgccaggt

SEQ ID NO: 17238 - DNA, 31 bp, Artificial Sequence
  Description of Artificial Sequence:  Enzymatic Nucleic Acid
aaagaatgggctagctacaacgattctcgct

SEQ ID NO: 17239 - DNA, 31 bp, Artificial Sequence
  Description of Artificial Sequence:  Enzymatic Nucleic Acid
taaaagaaggctagctacaacgagtttctcg

SEQ ID NO: 17240 - DNA, 31 bp, Artificial Sequence
  Description of Artificial Sequence:  Enzymatic Nucleic Acid
ttctcagaggctagctacaacgaaaaagaat

SEQ ID NO: 17241 - DNA, 31 bp, Artificial Sequence
  Description of Artificial Sequence:  Enzymatic Nucleic Acid
ccacgttgggctagctacaacgatctcagat

SEQ ID NO: 17242 - DNA, 31 bp, Artificial Sequence
  Description of Artificial Sequence:  Enzymatic Nucleic Acid
tcaccacgggctagctacaacgatgttctca

SEQ ID NO: 17243 - DNA, 31 bp, Artificial Sequence
  Description of Artificial Sequence:  Enzymatic Nucleic Acid
cttcaccaggctagctacaacgagttgttct

SEQ ID NO: 17244 - DNA, 31 bp, Artificial Sequence
  Description of Artificial Sequence:  Enzymatic Nucleic Acid
aatcttcaggctagctacaacgacacgttgt

SEQ ID NO: 17245 - DNA, 31 bp, Artificial Sequence
  Description of Artificial Sequence:  Enzymatic Nucleic Acid
atcacaaaggctagctacaacgacttcacca

SEQ ID NO: 17246 - DNA, 31 bp, Artificial Sequence
  Description of Artificial Sequence:  Enzymatic Nucleic Acid
caaaatcaggctagctacaacgaaaatcttc

SEQ ID NO: 17247 - DNA, 31 bp, Artificial Sequence
  Description of Artificial Sequence:  Enzymatic Nucleic Acid
ggccaaaaggctagctacaacgacacaaatc

SEQ ID NO: 17248 - DNA, 31 bp, Artificial Sequence
  Description of Artificial Sequence:  Enzymatic Nucleic Acid
gggcaaggggctagctacaacgacaaaatca

SEQ ID NO: 17249 - DNA, 31 bp, Artificial Sequence
  Description of Artificial Sequence:  Enzymatic Nucleic Acid
atcccgggggctagctacaacgaaaggccaa

SEQ ID NO: 17250 - DNA, 31 bp, Artificial Sequence
  Description of Artificial Sequence:  Enzymatic Nucleic Acid
tataaataggctagctacaacgacccgggca

SEQ ID NO: 17251 - DNA, 31 bp, Artificial Sequence
  Description of Artificial Sequence:  Enzymatic Nucleic Acid
cttataaaggctagctacaacgaatcccggg

SEQ ID NO: 17252 - DNA, 31 bp, Artificial Sequence
  Description of Artificial Sequence:  Enzymatic Nucleic Acid
ggttcttaggctagctacaacgaaaatatcc

SEQ ID NO: 17253 - DNA, 31 bp, Artificial Sequence
  Description of Artificial Sequence:  Enzymatic Nucleic Acid
aatcggggggctagctacaacgatcttataa

SEQ ID NO: 17254 - DNA, 31 bp, Artificial Sequence
  Description of Artificial Sequence:  Enzymatic Nucleic Acid
tcacataaggctagctacaacgacggggttc

SEQ ID NO: 17255 - DNA, 31 bp, Artificial Sequence
  Description of Artificial Sequence:  Enzymatic Nucleic Acid
ttctcacaggctagctacaacgaaatcgggg

SEQ ID NO: 17256 - DNA, 31 bp, Artificial Sequence
  Description of Artificial Sequence:  Enzymatic Nucleic Acid
ttttctcaggctagctacaacgaataatcgg

SEQ ID NO: 17257 - DNA, 31 bp, Artificial Sequence
  Description of Artificial Sequence:  Enzymatic Nucleic Acid
gtcgagtaggctagctacaacgactcctttt

SEQ ID NO: 17258 - DNA, 31 bp, Artificial Sequence
  Description of Artificial Sequence:  Enzymatic Nucleic Acid
aagtcgagggctagctacaacgaatctcctt

SEQ ID NO: 17259 - DNA, 31 bp, Artificial Sequence
  Description of Artificial Sequence:  Enzymatic Nucleic Acid
agaggaagggctagctacaacgacgagtatc

SEQ ID NO: 17260 - DNA, 31 bp, Artificial Sequence
  Description of Artificial Sequence:  Enzymatic Nucleic Acid
gccatccaggctagctacaacgattcagagg

SEQ ID NO: 17261 - DNA, 31 bp, Artificial Sequence
  Description of Artificial Sequence:  Enzymatic Nucleic Acid
gggagccaggctagctacaacgaccatttca

SEQ ID NO: 17262 - DNA, 31 bp, Artificial Sequence
  Description of Artificial Sequence:  Enzymatic Nucleic Acid
ttcgggagggctagctacaacgacatccatt

SEQ ID NO: 17263 - DNA, 31 bp, Artificial Sequence
  Description of Artificial Sequence:  Enzymatic Nucleic Acid
aagatagaggctagctacaacgatcgggagc

SEQ ID NO: 17264 - DNA, 31 bp, Artificial Sequence
  Description of Artificial Sequence:  Enzymatic Nucleic Acid
gtcaaagaggctagctacaacgaagattcgg

SEQ ID NO: 17265 - DNA, 31 bp, Artificial Sequence
  Description of Artificial Sequence:  Enzymatic Nucleic Acid
agattttgggctagctacaacgacaaagata

SEQ ID NO: 17266 - DNA, 31 bp, Artificial Sequence
  Description of Artificial Sequence:  Enzymatic Nucleic Acid
gctgtagaggctagctacaacgatttgtcaa

SEQ ID NO: 17267 - DNA, 31 bp, Artificial Sequence
  Description of Artificial Sequence:  Enzymatic Nucleic Acid
tggtgctgggctagctacaacgaagattttg

SEQ ID NO: 17268 - DNA, 31 bp, Artificial Sequence
  Description of Artificial Sequence:  Enzymatic Nucleic Acid
tcttggtgggctagctacaacgatgtagatt

SEQ ID NO: 17269 - DNA, 31 bp, Artificial Sequence
  Description of Artificial Sequence:  Enzymatic Nucleic Acid
gctcttggggctagctacaacgagctgtaga

SEQ ID NO: 17270 - DNA, 31 bp, Artificial Sequence
  Description of Artificial Sequence:  Enzymatic Nucleic Acid
acacgtcgggctagctacaacgatcttggtg

SEQ ID NO: 17271 - DNA, 31 bp, Artificial Sequence
  Description of Artificial Sequence:  Enzymatic Nucleic Acid
accacacgggctagctacaacgacgctcttg

SEQ ID NO: 17272 - DNA, 31 bp, Artificial Sequence
  Description of Artificial Sequence:  Enzymatic Nucleic Acid
agaccacaggctagctacaacgagtcgctct

SEQ ID NO: 17273 - DNA, 31 bp, Artificial Sequence
  Description of Artificial Sequence:  Enzymatic Nucleic Acid
taagaccaggctagctacaacgaacgtcgct

SEQ ID NO: 17274 - DNA, 31 bp, Artificial Sequence
  Description of Artificial Sequence:  Enzymatic Nucleic Acid
ccgtaagaggctagctacaacgacacacgtc

SEQ ID NO: 17275 - DNA, 31 bp, Artificial Sequence
  Description of Artificial Sequence:  Enzymatic Nucleic Acid
atactccgggctagctacaacgaaagaccac

SEQ ID NO: 17276 - DNA, 31 bp, Artificial Sequence
  Description of Artificial Sequence:  Enzymatic Nucleic Acid
cagcaataggctagctacaacgatccgtaag

SEQ ID NO: 17277 - DNA, 31 bp, Artificial Sequence
  Description of Artificial Sequence:  Enzymatic Nucleic Acid
cacagcaaggctagctacaacgaactccgta

SEQ ID NO: 17278 - DNA, 31 bp, Artificial Sequence
  Description of Artificial Sequence:  Enzymatic Nucleic Acid
tcccacagggctagctacaacgaaatactcc

SEQ ID NO: 17279 - DNA, 31 bp, Artificial Sequence
  Description of Artificial Sequence:  Enzymatic Nucleic Acid
atttcccaggctagctacaacgaagcaatac

SEQ ID NO: 17280 - DNA, 31 bp, Artificial Sequence
  Description of Artificial Sequence:  Enzymatic Nucleic Acid
ggagaagaggctagctacaacgattcccaca

SEQ ID NO: 17281 - DNA, 31 bp, Artificial Sequence
  Description of Artificial Sequence:  Enzymatic Nucleic Acid
gagacccaggctagctacaacgactaaggag

SEQ ID NO: 17282 - DNA, 31 bp, Artificial Sequence
  Description of Artificial Sequence:  Enzymatic Nucleic Acid
tatggagaggctagctacaacgaccacctaa

SEQ ID NO: 17283 - DNA, 31 bp, Artificial Sequence
  Description of Artificial Sequence:  Enzymatic Nucleic Acid
cctgggtaggctagctacaacgaggagaccc

SEQ ID NO: 17284 - DNA, 31 bp, Artificial Sequence
  Description of Artificial Sequence:  Enzymatic Nucleic Acid
ctcctgggggctagctacaacgaatggagac

SEQ ID NO: 17285 - DNA, 31 bp, Artificial Sequence
  Description of Artificial Sequence:  Enzymatic Nucleic Acid
catttgtaggctagctacaacgatcctgggt

SEQ ID NO: 17286 - DNA, 31 bp, Artificial Sequence
  Description of Artificial Sequence:  Enzymatic Nucleic Acid
tccatttgggctagctacaacgaactcctgg

SEQ ID NO: 17287 - DNA, 31 bp, Artificial Sequence
  Description of Artificial Sequence:  Enzymatic Nucleic Acid
ctcatccaggctagctacaacgattgtactc

SEQ ID NO: 17288 - DNA, 31 bp, Artificial Sequence
  Description of Artificial Sequence:  Enzymatic Nucleic Acid
agtcctcaggctagctacaacgaccatttgt

SEQ ID NO: 17289 - DNA, 31 bp, Artificial Sequence
  Description of Artificial Sequence:  Enzymatic Nucleic Acid
tgcaaaagggctagctacaacgacctcatcc

SEQ ID NO: 17290 - DNA, 31 bp, Artificial Sequence
  Description of Artificial Sequence:  Enzymatic Nucleic Acid
ggcgactgggctagctacaacgaaaaagtcc

SEQ ID NO: 17291 - DNA, 31 bp, Artificial Sequence
  Description of Artificial Sequence:  Enzymatic Nucleic Acid
tcaggcgaggctagctacaacgatgcaaaag

SEQ ID NO: 17292 - DNA, 31 bp, Artificial Sequence
  Description of Artificial Sequence:  Enzymatic Nucleic Acid
ccctcaggggctagctacaacgagactgcaa

SEQ ID NO: 17293 - DNA, 31 bp, Artificial Sequence
  Description of Artificial Sequence:  Enzymatic Nucleic Acid
tcctcatgggctagctacaacgacttccctc

SEQ ID NO: 17294 - DNA, 31 bp, Artificial Sequence
  Description of Artificial Sequence:  Enzymatic Nucleic Acid
catcctcaggctagctacaacgagccttccc

SEQ ID NO: 17295 - DNA, 31 bp, Artificial Sequence
  Description of Artificial Sequence:  Enzymatic Nucleic Acid
agctctcaggctagctacaacgacctcatgc

SEQ ID NO: 17296 - DNA, 31 bp, Artificial Sequence
  Description of Artificial Sequence:  Enzymatic Nucleic Acid
ctcaggagggctagctacaacgatctcatcc

SEQ ID NO: 17297 - DNA, 31 bp, Artificial Sequence
  Description of Artificial Sequence:  Enzymatic Nucleic Acid
gtagagtaggctagctacaacgatcaggagc

SEQ ID NO: 17298 - DNA, 31 bp, Artificial Sequence
  Description of Artificial Sequence:  Enzymatic Nucleic Acid
gagtagagggctagctacaacgaactcagga

SEQ ID NO: 17299 - DNA, 31 bp, Artificial Sequence
  Description of Artificial Sequence:  Enzymatic Nucleic Acid
ttcaggagggctagctacaacgaagagtact

SEQ ID NO: 17300 - DNA, 31 bp, Artificial Sequence
  Description of Artificial Sequence:  Enzymatic Nucleic Acid
ctgatagaggctagctacaacgattcaggag

SEQ ID NO: 17301 - DNA, 31 bp, Artificial Sequence
  Description of Artificial Sequence:  Enzymatic Nucleic Acid
tgatctgaggctagctacaacgaagatttca

SEQ ID NO: 17302 - DNA, 31 bp, Artificial Sequence
  Description of Artificial Sequence:  Enzymatic Nucleic Acid
cagcatgaggctagctacaacgactgataga

SEQ ID NO: 17303 - DNA, 31 bp, Artificial Sequence
  Description of Artificial Sequence:  Enzymatic Nucleic Acid
gtccagcaggctagctacaacgagatctgat

SEQ ID NO: 17304 - DNA, 31 bp, Artificial Sequence
  Description of Artificial Sequence:  Enzymatic Nucleic Acid
cagtccagggctagctacaacgaatgatctg

SEQ ID NO: 17305 - DNA, 31 bp, Artificial Sequence
  Description of Artificial Sequence:  Enzymatic Nucleic Acid
gccagcagggctagctacaacgaccagcatg

SEQ ID NO: 17306 - DNA, 31 bp, Artificial Sequence
  Description of Artificial Sequence:  Enzymatic Nucleic Acid
tgtgccagggctagctacaacgaagtccagc

SEQ ID NO: 17307 - DNA, 31 bp, Artificial Sequence
  Description of Artificial Sequence:  Enzymatic Nucleic Acid
tctctgtgggctagctacaacgacagcagtc

SEQ ID NO: 17308 - DNA, 31 bp, Artificial Sequence
  Description of Artificial Sequence:  Enzymatic Nucleic Acid
ggtctctgggctagctacaacgagccagcag

SEQ ID NO: 17309 - DNA, 31 bp, Artificial Sequence
  Description of Artificial Sequence:  Enzymatic Nucleic Acid
cttttgggggctagctacaacgactctgtgc

SEQ ID NO: 17310 - DNA, 31 bp, Artificial Sequence
  Description of Artificial Sequence:  Enzymatic Nucleic Acid
aatcttggggctagctacaacgactttcttt

SEQ ID NO: 17311 - DNA, 31 bp, Artificial Sequence
  Description of Artificial Sequence:  Enzymatic Nucleic Acid
tctgcaaaggctagctacaacgacttggcct

SEQ ID NO: 17312 - DNA, 31 bp, Artificial Sequence
  Description of Artificial Sequence:  Enzymatic Nucleic Acid
aagttctgggctagctacaacgaaaatcttg

SEQ ID NO: 17313 - DNA, 31 bp, Artificial Sequence
  Description of Artificial Sequence:  Enzymatic Nucleic Acid
tccacaagggctagctacaacgatctgcaaa

SEQ ID NO: 17314 - DNA, 31 bp, Artificial Sequence
  Description of Artificial Sequence:  Enzymatic Nucleic Acid
tttttccaggctagctacaacgaaagttctg

SEQ ID NO: 17315 - DNA, 31 bp, Artificial Sequence
  Description of Artificial Sequence:  Enzymatic Nucleic Acid
tcacctagggctagctacaacgattttccac

SEQ ID NO: 17316 - DNA, 31 bp, Artificial Sequence
  Description of Artificial Sequence:  Enzymatic Nucleic Acid
gcaaatcaggctagctacaacgactagtttt

SEQ ID NO: 17317 - DNA, 31 bp, Artificial Sequence
  Description of Artificial Sequence:  Enzymatic Nucleic Acid
gaagcaaaggctagctacaacgacacctagt

SEQ ID NO: 17318 - DNA, 31 bp, Artificial Sequence
  Description of Artificial Sequence:  Enzymatic Nucleic Acid
gcttgaagggctagctacaacgaaaatcacc

SEQ ID NO: 17319 - DNA, 31 bp, Artificial Sequence
  Description of Artificial Sequence:  Enzymatic Nucleic Acid
tacatttgggctagctacaacgattgaagca

SEQ ID NO: 17320 - DNA, 31 bp, Artificial Sequence
  Description of Artificial Sequence:  Enzymatic Nucleic Acid
gttgtacaggctagctacaacgattgcttga

SEQ ID NO: 17321 - DNA, 31 bp, Artificial Sequence
  Description of Artificial Sequence:  Enzymatic Nucleic Acid
ctgttgtaggctagctacaacgaatttgctt

SEQ ID NO: 17322 - DNA, 31 bp, Artificial Sequence
  Description of Artificial Sequence:  Enzymatic Nucleic Acid
tcctgttgggctagctacaacgaacatttgc

SEQ ID NO: 17323 - DNA, 31 bp, Artificial Sequence
  Description of Artificial Sequence:  Enzymatic Nucleic Acid
ccatcctgggctagctacaacgatgtacatt

SEQ ID NO: 17324 - DNA, 31 bp, Artificial Sequence
  Description of Artificial Sequence:  Enzymatic Nucleic Acid
ctttaccaggctagctacaacgacctgttgt

SEQ ID NO: 17325 - DNA, 31 bp, Artificial Sequence
  Description of Artificial Sequence:  Enzymatic Nucleic Acid
agtctttaggctagctacaacgacatcctgt

SEQ ID NO: 17326 - DNA, 31 bp, Artificial Sequence
  Description of Artificial Sequence:  Enzymatic Nucleic Acid
ggatgtagggctagctacaacgactttacca

SEQ ID NO: 17327 - DNA, 31 bp, Artificial Sequence
  Description of Artificial Sequence:  Enzymatic Nucleic Acid
ttgggatgggctagctacaacgaagtcttta

SEQ ID NO: 17328 - DNA, 31 bp, Artificial Sequence
  Description of Artificial Sequence:  Enzymatic Nucleic Acid
gattgggaggctagctacaacgagtagtctt

SEQ ID NO: 17329 - DNA, 31 bp, Artificial Sequence
  Description of Artificial Sequence:  Enzymatic Nucleic Acid
ggcattgaggctagctacaacgatgggatgt

SEQ ID NO: 17330 - DNA, 31 bp, Artificial Sequence
  Description of Artificial Sequence:  Enzymatic Nucleic Acid
gtatggcaggctagctacaacgatgattggg

SEQ ID NO: 17331 - DNA, 31 bp, Artificial Sequence
  Description of Artificial Sequence:  Enzymatic Nucleic Acid
cagtatggggctagctacaacgaattgattg

SEQ ID NO: 17332 - DNA, 31 bp, Artificial Sequence
  Description of Artificial Sequence:  Enzymatic Nucleic Acid
tgtcagtaggctagctacaacgaggcattga

SEQ ID NO: 17333 - DNA, 31 bp, Artificial Sequence
  Description of Artificial Sequence:  Enzymatic Nucleic Acid
cctgtcagggctagctacaacgaatggcatt

SEQ ID NO: 17334 - DNA, 31 bp, Artificial Sequence
  Description of Artificial Sequence:  Enzymatic Nucleic Acid
atttcctgggctagctacaacgacagtatgg

SEQ ID NO: 17335 - DNA, 31 bp, Artificial Sequence
  Description of Artificial Sequence:  Enzymatic Nucleic Acid
acccactaggctagctacaacgattcctgtc

SEQ ID NO: 17336 - DNA, 31 bp, Artificial Sequence
  Description of Artificial Sequence:  Enzymatic Nucleic Acid
taaacccaggctagctacaacgatatttcct

SEQ ID NO: 17337 - DNA, 31 bp, Artificial Sequence
  Description of Artificial Sequence:  Enzymatic Nucleic Acid
tatgtaaaggctagctacaacgaccactatt

SEQ ID NO: 17338 - DNA, 31 bp, Artificial Sequence
  Description of Artificial Sequence:  Enzymatic Nucleic Acid
tgagtatgggctagctacaacgaaaacccac

SEQ ID NO: 17339 - DNA, 31 bp, Artificial Sequence
  Description of Artificial Sequence:  Enzymatic Nucleic Acid
gttgagtaggctagctacaacgagtaaaccc

SEQ ID NO: 17340 - DNA, 31 bp, Artificial Sequence
  Description of Artificial Sequence:  Enzymatic Nucleic Acid
gagttgagggctagctacaacgaatgtaaac

SEQ ID NO: 17341 - DNA, 31 bp, Artificial Sequence
  Description of Artificial Sequence:  Enzymatic Nucleic Acid
ggcaggagggctagctacaacgatgagtatg

SEQ ID NO: 17342 - DNA, 31 bp, Artificial Sequence
  Description of Artificial Sequence:  Enzymatic Nucleic Acid
agagaaggggctagctacaacgaaggagttg

SEQ ID NO: 17343 - DNA, 31 bp, Artificial Sequence
  Description of Artificial Sequence:  Enzymatic Nucleic Acid
tgaagaagggctagctacaacgacctcagag

SEQ ID NO: 17344 - DNA, 31 bp, Artificial Sequence
  Description of Artificial Sequence:  Enzymatic Nucleic Acid
ctgaaataggctagctacaacgatttccttg

SEQ ID NO: 17345 - DNA, 31 bp, Artificial Sequence
  Description of Artificial Sequence:  Enzymatic Nucleic Acid
agctgaaaggctagctacaacgaactttcct

SEQ ID NO: 17346 - DNA, 31 bp, Artificial Sequence
  Description of Artificial Sequence:  Enzymatic Nucleic Acid
cttcggagggctagctacaacgatgaaatac

SEQ ID NO: 17347 - DNA, 31 bp, Artificial Sequence
  Description of Artificial Sequence:  Enzymatic Nucleic Acid
gaattaaaggctagctacaacgattcggagc

SEQ ID NO: 17348 - DNA, 31 bp, Artificial Sequence
  Description of Artificial Sequence:  Enzymatic Nucleic Acid
ttcctgaaggctagctacaacgataaacttc

SEQ ID NO: 17349 - DNA, 31 bp, Artificial Sequence
  Description of Artificial Sequence:  Enzymatic Nucleic Acid
catcagagggctagctacaacgattcctgaa

SEQ ID NO: 17350 - DNA, 31 bp, Artificial Sequence
  Description of Artificial Sequence:  Enzymatic Nucleic Acid
tgacatcaggctagctacaacgacagagctt

SEQ ID NO: 17351 - DNA, 31 bp, Artificial Sequence
  Description of Artificial Sequence:  Enzymatic Nucleic Acid
atctgacaggctagctacaacgacatcagag

SEQ ID NO: 17352 - DNA, 31 bp, Artificial Sequence
  Description of Artificial Sequence:  Enzymatic Nucleic Acid
atatctgaggctagctacaacgaatcatcag

SEQ ID NO: 17353 - DNA, 31 bp, Artificial Sequence
  Description of Artificial Sequence:  Enzymatic Nucleic Acid
tttacataggctagctacaacgactgacatc

SEQ ID NO: 17354 - DNA, 31 bp, Artificial Sequence
  Description of Artificial Sequence:  Enzymatic Nucleic Acid
catttacaggctagctacaacgaatctgaca

SEQ ID NO: 17355 - DNA, 31 bp, Artificial Sequence
  Description of Artificial Sequence:  Enzymatic Nucleic Acid
agcatttaggctagctacaacgaatatctga

SEQ ID NO: 17356 - DNA, 31 bp, Artificial Sequence
  Description of Artificial Sequence:  Enzymatic Nucleic Acid
tgaaagcaggctagctacaacgattacatat

SEQ ID NO: 17357 - DNA, 31 bp, Artificial Sequence
  Description of Artificial Sequence:  Enzymatic Nucleic Acid
cttgaaagggctagctacaacgaatttacat

SEQ ID NO: 17358 - DNA, 31 bp, Artificial Sequence
  Description of Artificial Sequence:  Enzymatic Nucleic Acid
ctcatgaaggctagctacaacgattgaaagc

SEQ ID NO: 17359 - DNA, 31 bp, Artificial Sequence
  Description of Artificial Sequence:  Enzymatic Nucleic Acid
caggctcaggctagctacaacgagaacttga

SEQ ID NO: 17360 - DNA, 31 bp, Artificial Sequence
  Description of Artificial Sequence:  Enzymatic Nucleic Acid
tttccaggggctagctacaacgatcatgaac

SEQ ID NO: 17361 - DNA, 31 bp, Artificial Sequence
  Description of Artificial Sequence:  Enzymatic Nucleic Acid
ggttttgaggctagctacaacgatctttcca

SEQ ID NO: 17362 - DNA, 31 bp, Artificial Sequence
  Description of Artificial Sequence:  Enzymatic Nucleic Acid
ttcaaaggggctagctacaacgatttgattc

SEQ ID NO: 17363 - DNA, 31 bp, Artificial Sequence
  Description of Artificial Sequence:  Enzymatic Nucleic Acid
ggtaaaagggctagctacaacgatcttcaaa

SEQ ID NO: 17364 - DNA, 31 bp, Artificial Sequence
  Description of Artificial Sequence:  Enzymatic Nucleic Acid
gcattcggggctagctacaacgaaaaagttc

SEQ ID NO: 17365 - DNA, 31 bp, Artificial Sequence
  Description of Artificial Sequence:  Enzymatic Nucleic Acid
aggtggcaggctagctacaacgatcggtaaa

SEQ ID NO: 17366 - DNA, 31 bp, Artificial Sequence
  Description of Artificial Sequence:  Enzymatic Nucleic Acid
ggaggtggggctagctacaacgaattcggta

SEQ ID NO: 17367 - DNA, 31 bp, Artificial Sequence
  Description of Artificial Sequence:  Enzymatic Nucleic Acid
catggaggggctagctacaacgaggcattcg

SEQ ID NO: 17368 - DNA, 31 bp, Artificial Sequence
  Description of Artificial Sequence:  Enzymatic Nucleic Acid
atcaaacaggctagctacaacgaggaggtgg

SEQ ID NO: 17369 - DNA, 31 bp, Artificial Sequence
  Description of Artificial Sequence:  Enzymatic Nucleic Acid
tcatcaaaggctagctacaacgaatggaggt

SEQ ID NO: 17370 - DNA, 31 bp, Artificial Sequence
  Description of Artificial Sequence:  Enzymatic Nucleic Acid
ggtagtcaggctagctacaacgacaaacatg

SEQ ID NO: 17371 - DNA, 31 bp, Artificial Sequence
  Description of Artificial Sequence:  Enzymatic Nucleic Acid
cctggtagggctagctacaacgacatcaaac

SEQ ID NO: 17372 - DNA, 31 bp, Artificial Sequence
  Description of Artificial Sequence:  Enzymatic Nucleic Acid
cgccctggggctagctacaacgaagtcatca

SEQ ID NO: 17373 - DNA, 31 bp, Artificial Sequence
  Description of Artificial Sequence:  Enzymatic Nucleic Acid
tgctgtcgggctagctacaacgacctggtag

SEQ ID NO: 17374 - DNA, 31 bp, Artificial Sequence
  Description of Artificial Sequence:  Enzymatic Nucleic Acid
tgctgctgggctagctacaacgacgccctgg

SEQ ID NO: 17375 - DNA, 31 bp, Artificial Sequence
  Description of Artificial Sequence:  Enzymatic Nucleic Acid
gagtgctgggctagctacaacgatgtcgccc

SEQ ID NO: 17376 - DNA, 31 bp, Artificial Sequence
  Description of Artificial Sequence:  Enzymatic Nucleic Acid
acagagtgggctagctacaacgatgctgtcg

SEQ ID NO: 17377 - DNA, 31 bp, Artificial Sequence
  Description of Artificial Sequence:  Enzymatic Nucleic Acid
caacagagggctagctacaacgagctgctgt

SEQ ID NO: 17378 - DNA, 31 bp, Artificial Sequence
  Description of Artificial Sequence:  Enzymatic Nucleic Acid
gaggccaaggctagctacaacgaagagtgct

SEQ ID NO: 17379 - DNA, 31 bp, Artificial Sequence
  Description of Artificial Sequence:  Enzymatic Nucleic Acid
gggagaggggctagctacaacgacaacagag

SEQ ID NO: 17380 - DNA, 31 bp, Artificial Sequence
  Description of Artificial Sequence:  Enzymatic Nucleic Acid
cttcagcaggctagctacaacgagggagagg

SEQ ID NO: 17381 - DNA, 31 bp, Artificial Sequence
  Description of Artificial Sequence:  Enzymatic Nucleic Acid
cgcttcagggctagctacaacgaatgggaga

SEQ ID NO: 17382 - DNA, 31 bp, Artificial Sequence
  Description of Artificial Sequence:  Enzymatic Nucleic Acid
gtgaagcgggctagctacaacgattcagcat

SEQ ID NO: 17383 - DNA, 31 bp, Artificial Sequence
  Description of Artificial Sequence:  Enzymatic Nucleic Acid
aggtgaagggctagctacaacgagcttcagc

SEQ ID NO: 17384 - DNA, 31 bp, Artificial Sequence
  Description of Artificial Sequence:  Enzymatic Nucleic Acid
agtccaggggctagctacaacgagaagcgct

SEQ ID NO: 17385 - DNA, 31 bp, Artificial Sequence
  Description of Artificial Sequence:  Enzymatic Nucleic Acid
gctgtcagggctagctacaacgaccaggtga

SEQ ID NO: 17386 - DNA, 31 bp, Artificial Sequence
  Description of Artificial Sequence:  Enzymatic Nucleic Acid
gtttgctgggctagctacaacgacagtccag

SEQ ID NO: 17387 - DNA, 31 bp, Artificial Sequence
  Description of Artificial Sequence:  Enzymatic Nucleic Acid
tgggtttgggctagctacaacgatgtcagtc

SEQ ID NO: 17388 - DNA, 31 bp, Artificial Sequence
  Description of Artificial Sequence:  Enzymatic Nucleic Acid
gccttgggggctagctacaacgattgctgtc

SEQ ID NO: 17389 - DNA, 31 bp, Artificial Sequence
  Description of Artificial Sequence:  Enzymatic Nucleic Acid
gagcgaggggctagctacaacgacttgggtt

SEQ ID NO: 17390 - DNA, 31 bp, Artificial Sequence
  Description of Artificial Sequence:  Enzymatic Nucleic Acid
atcttgagggctagctacaacgagaggcctt

SEQ ID NO: 17391 - DNA, 31 bp, Artificial Sequence
  Description of Artificial Sequence:  Enzymatic Nucleic Acid
caagtcaaggctagctacaacgacttgagcg

SEQ ID NO: 17392 - DNA, 31 bp, Artificial Sequence
  Description of Artificial Sequence:  Enzymatic Nucleic Acid
ctctcaagggctagctacaacgacaatcttg

SEQ ID NO: 17393 - DNA, 31 bp, Artificial Sequence
  Description of Artificial Sequence:  Enzymatic Nucleic Acid
actggttaggctagctacaacgatctcaagt

SEQ ID NO: 17394 - DNA, 31 bp, Artificial Sequence
  Description of Artificial Sequence:  Enzymatic Nucleic Acid
tttactggggctagctacaacgatactctca

SEQ ID NO: 17395 - DNA, 31 bp, Artificial Sequence
  Description of Artificial Sequence:  Enzymatic Nucleic Acid
tacttttaggctagctacaacgatggttact

SEQ ID NO: 17396 - DNA, 31 bp, Artificial Sequence
  Description of Artificial Sequence:  Enzymatic Nucleic Acid
actccttaggctagctacaacgattttactg

SEQ ID NO: 17397 - DNA, 31 bp, Artificial Sequence
  Description of Artificial Sequence:  Enzymatic Nucleic Acid
agccccgaggctagctacaacgatccttact

SEQ ID NO: 17398 - DNA, 31 bp, Artificial Sequence
  Description of Artificial Sequence:  Enzymatic Nucleic Acid
tcagacagggctagctacaacgacccgactc

SEQ ID NO: 17399 - DNA, 31 bp, Artificial Sequence
  Description of Artificial Sequence:  Enzymatic Nucleic Acid
acatcagaggctagctacaacgaagccccga

SEQ ID NO: 17400 - DNA, 31 bp, Artificial Sequence
  Description of Artificial Sequence:  Enzymatic Nucleic Acid
tgctgacaggctagctacaacgacagacagc

SEQ ID NO: 17401 - DNA, 31 bp, Artificial Sequence
  Description of Artificial Sequence:  Enzymatic Nucleic Acid
cctgctgaggctagctacaacgaatcagaca

SEQ ID NO: 17402 - DNA, 31 bp, Artificial Sequence
  Description of Artificial Sequence:  Enzymatic Nucleic Acid
tgggcctgggctagctacaacgatgacatca

SEQ ID NO: 17403 - DNA, 31 bp, Artificial Sequence
  Description of Artificial Sequence:  Enzymatic Nucleic Acid
aaactgggggctagctacaacgactgctgac

SEQ ID NO: 17404 - DNA, 31 bp, Artificial Sequence
  Description of Artificial Sequence:  Enzymatic Nucleic Acid
ggcagaaaggctagctacaacgatgggcctg

SEQ ID NO: 17405 - DNA, 31 bp, Artificial Sequence
  Description of Artificial Sequence:  Enzymatic Nucleic Acid
tggaatggggctagctacaacgaagaaactg

SEQ ID NO: 17406 - DNA, 31 bp, Artificial Sequence
  Description of Artificial Sequence:  Enzymatic Nucleic Acid
agctggaaggctagctacaacgaggcagaaa

SEQ ID NO: 17407 - DNA, 31 bp, Artificial Sequence
  Description of Artificial Sequence:  Enzymatic Nucleic Acid
gcccacagggctagctacaacgatggaatgg

SEQ ID NO: 17408 - DNA, 31 bp, Artificial Sequence
  Description of Artificial Sequence:  Enzymatic Nucleic Acid
cgtgcccaggctagctacaacgaagctggaa

SEQ ID NO: 17409 - DNA, 31 bp, Artificial Sequence
  Description of Artificial Sequence:  Enzymatic Nucleic Acid
ctgacgtgggctagctacaacgaccacagct

SEQ ID NO: 17410 - DNA, 31 bp, Artificial Sequence
  Description of Artificial Sequence:  Enzymatic Nucleic Acid
cgctgacgggctagctacaacgagcccacag

SEQ ID NO: 17411 - DNA, 31 bp, Artificial Sequence
  Description of Artificial Sequence:  Enzymatic Nucleic Acid
ttcgctgaggctagctacaacgagtgcccac

SEQ ID NO: 17412 - DNA, 31 bp, Artificial Sequence
  Description of Artificial Sequence:  Enzymatic Nucleic Acid
tgccttcgggctagctacaacgatgacgtgc

SEQ ID NO: 17413 - DNA, 31 bp, Artificial Sequence
  Description of Artificial Sequence:  Enzymatic Nucleic Acid
tgcgcttgggctagctacaacgacttcgctg

SEQ ID NO: 17414 - DNA, 31 bp, Artificial Sequence
  Description of Artificial Sequence:  Enzymatic Nucleic Acid
aacctgcgggctagctacaacgattgccttc

SEQ ID NO: 17415 - DNA, 31 bp, Artificial Sequence
  Description of Artificial Sequence:  Enzymatic Nucleic Acid
tgaacctgggctagctacaacgagcttgcct

SEQ ID NO: 17416 - DNA, 31 bp, Artificial Sequence
  Description of Artificial Sequence:  Enzymatic Nucleic Acid
taggtgaaggctagctacaacgactgcgctt

SEQ ID NO: 17417 - DNA, 31 bp, Artificial Sequence
  Description of Artificial Sequence:  Enzymatic Nucleic Acid
gtcgtaggggctagctacaacgagaacctgc

SEQ ID NO: 17418 - DNA, 31 bp, Artificial Sequence
  Description of Artificial Sequence:  Enzymatic Nucleic Acid
cgtggtcgggctagctacaacgaaggtgaac

SEQ ID NO: 17419 - DNA, 31 bp, Artificial Sequence
  Description of Artificial Sequence:  Enzymatic Nucleic Acid
cagcgtggggctagctacaacgacgtaggtg

SEQ ID NO: 17420 - DNA, 31 bp, Artificial Sequence
  Description of Artificial Sequence:  Enzymatic Nucleic Acid
gctcagcgggctagctacaacgaggtcgtag

SEQ ID NO: 17421 - DNA, 31 bp, Artificial Sequence
  Description of Artificial Sequence:  Enzymatic Nucleic Acid
cagctcagggctagctacaacgagtggtcgt

SEQ ID NO: 17422 - DNA, 31 bp, Artificial Sequence
  Description of Artificial Sequence:  Enzymatic Nucleic Acid
ctttccagggctagctacaacgatcagcgtg

SEQ ID NO: 17423 - DNA, 31 bp, Artificial Sequence
  Description of Artificial Sequence:  Enzymatic Nucleic Acid
gcacgcgaggctagctacaacgatttccttt

SEQ ID NO: 17424 - DNA, 31 bp, Artificial Sequence
  Description of Artificial Sequence:  Enzymatic Nucleic Acid
gcagcacgggctagctacaacgagattttcc

SEQ ID NO: 17425 - DNA, 31 bp, Artificial Sequence
  Description of Artificial Sequence:  Enzymatic Nucleic Acid
gagcagcaggctagctacaacgagcgatttt

SEQ ID NO: 17426 - DNA, 31 bp, Artificial Sequence
  Description of Artificial Sequence:  Enzymatic Nucleic Acid
gggagcagggctagctacaacgaacgcgatt

SEQ ID NO: 17427 - DNA, 31 bp, Artificial Sequence
  Description of Artificial Sequence:  Enzymatic Nucleic Acid
gcggggagggctagctacaacgaagcacgcg

SEQ ID NO: 17428 - DNA, 31 bp, Artificial Sequence
  Description of Artificial Sequence:  Enzymatic Nucleic Acid
tctgggggggctagctacaacgaggggagca

SEQ ID NO: 17429 - DNA, 31 bp, Artificial Sequence
  Description of Artificial Sequence:  Enzymatic Nucleic Acid
agttgtagggctagctacaacgactgggggc

SEQ ID NO: 17430 - DNA, 31 bp, Artificial Sequence
  Description of Artificial Sequence:  Enzymatic Nucleic Acid
ccgagttgggctagctacaacgaagtctggg

SEQ ID NO: 17431 - DNA, 31 bp, Artificial Sequence
  Description of Artificial Sequence:  Enzymatic Nucleic Acid
ccaccgagggctagctacaacgatgtagtct

SEQ ID NO: 17432 - DNA, 31 bp, Artificial Sequence
  Description of Artificial Sequence:  Enzymatic Nucleic Acid
caggaccaggctagctacaacgacgagttgt

SEQ ID NO: 17433 - DNA, 31 bp, Artificial Sequence
  Description of Artificial Sequence:  Enzymatic Nucleic Acid
gtacaggaggctagctacaacgacaccgagt

SEQ ID NO: 17434 - DNA, 31 bp, Artificial Sequence
  Description of Artificial Sequence:  Enzymatic Nucleic Acid
gtggagtaggctagctacaacgaaggaccac

SEQ ID NO: 17435 - DNA, 31 bp, Artificial Sequence
  Description of Artificial Sequence:  Enzymatic Nucleic Acid
gggtggagggctagctacaacgaacaggacc

SEQ ID NO: 17436 - DNA, 31 bp, Artificial Sequence
  Description of Artificial Sequence:  Enzymatic Nucleic Acid
gggtggggggctagctacaacgaggagtaca

SEQ ID NO: 17437 - DNA, 31 bp, Artificial Sequence
  Description of Artificial Sequence:  Enzymatic Nucleic Acid
tagatgggggctagctacaacgaggggtgga

SEQ ID NO: 17438 - DNA, 31 bp, Artificial Sequence
  Description of Artificial Sequence:  Enzymatic Nucleic Acid
actctagaggctagctacaacgagggtgggg

SEQ ID NO: 17439 - DNA, 31 bp, Artificial Sequence
  Description of Artificial Sequence:  Enzymatic Nucleic Acid
gtgtcaaaggctagctacaacgatctagatg

SEQ ID NO: 17440 - DNA, 31 bp, Artificial Sequence
  Description of Artificial Sequence:  Enzymatic Nucleic Acid
gcttcgtgggctagctacaacgacaaactct

SEQ ID NO: 17441 - DNA, 31 bp, Artificial Sequence
  Description of Artificial Sequence:  Enzymatic Nucleic Acid
aggcttcgggctagctacaacgagtcaaact

SEQ ID NO: 17442 - DNA, 31 bp, Artificial Sequence
  Description of Artificial Sequence:  Enzymatic Nucleic Acid
aaataaggggctagctacaacgattcgtgtc

SEQ ID NO: 17443 - DNA, 31 bp, Artificial Sequence
  Description of Artificial Sequence:  Enzymatic Nucleic Acid
tctagaaaggctagctacaacgaaaggcttc

SEQ ID NO: 17444 - DNA, 31 bp, Artificial Sequence
  Description of Artificial Sequence:  Enzymatic Nucleic Acid
cacatgtgggctagctacaacgattctagaa

SEQ ID NO: 17445 - DNA, 31 bp, Artificial Sequence
  Description of Artificial Sequence:  Enzymatic Nucleic Acid
tacacatgggctagctacaacgagcttctag

SEQ ID NO: 17446 - DNA, 31 bp, Artificial Sequence
  Description of Artificial Sequence:  Enzymatic Nucleic Acid
aatacacaggctagctacaacgagtgcttct

SEQ ID NO: 17447 - DNA, 31 bp, Artificial Sequence
  Description of Artificial Sequence:  Enzymatic Nucleic Acid
taaatacaggctagctacaacgaatgtgctt

SEQ ID NO: 17448 - DNA, 31 bp, Artificial Sequence
  Description of Artificial Sequence:  Enzymatic Nucleic Acid
tataaataggctagctacaacgaacatgtgc

SEQ ID NO: 17449 - DNA, 31 bp, Artificial Sequence
  Description of Artificial Sequence:  Enzymatic Nucleic Acid
ggtataaaggctagctacaacgaacacatgt

SEQ ID NO: 17450 - DNA, 31 bp, Artificial Sequence
  Description of Artificial Sequence:  Enzymatic Nucleic Acid
tgggggtaggctagctacaacgaaaatacac

SEQ ID NO: 17451 - DNA, 31 bp, Artificial Sequence
  Description of Artificial Sequence:  Enzymatic Nucleic Acid
cctgggggggctagctacaacgaataaatac

SEQ ID NO: 17452 - DNA, 31 bp, Artificial Sequence
  Description of Artificial Sequence:  Enzymatic Nucleic Acid
aaagctagggctagctacaacgattcctggg

SEQ ID NO: 17453 - DNA, 31 bp, Artificial Sequence
  Description of Artificial Sequence:  Enzymatic Nucleic Acid
ggcaaaagggctagctacaacgatagtttcc

SEQ ID NO: 17454 - DNA, 31 bp, Artificial Sequence
  Description of Artificial Sequence:  Enzymatic Nucleic Acid
aatactggggctagctacaacgaaaaagcta

SEQ ID NO: 17455 - DNA, 31 bp, Artificial Sequence
  Description of Artificial Sequence:  Enzymatic Nucleic Acid
gcataataggctagctacaacgatggcaaaa

SEQ ID NO: 17456 - DNA, 31 bp, Artificial Sequence
  Description of Artificial Sequence:  Enzymatic Nucleic Acid
atgcataaggctagctacaacgaactggcaa

SEQ ID NO: 17457 - DNA, 31 bp, Artificial Sequence
  Description of Artificial Sequence:  Enzymatic Nucleic Acid
tatatgcaggctagctacaacgaaatactgg

SEQ ID NO: 17458 - DNA, 31 bp, Artificial Sequence
  Description of Artificial Sequence:  Enzymatic Nucleic Acid
tatatatgggctagctacaacgaataatact

SEQ ID NO: 17459 - DNA, 31 bp, Artificial Sequence
  Description of Artificial Sequence:  Enzymatic Nucleic Acid
cttatataggctagctacaacgagcataata

SEQ ID NO: 17460 - DNA, 31 bp, Artificial Sequence
  Description of Artificial Sequence:  Enzymatic Nucleic Acid
aacttataggctagctacaacgaatgcataa

SEQ ID NO: 17461 - DNA, 31 bp, Artificial Sequence
  Description of Artificial Sequence:  Enzymatic Nucleic Acid
taaacttaggctagctacaacgaatatgcat

SEQ ID NO: 17462 - DNA, 31 bp, Artificial Sequence
  Description of Artificial Sequence:  Enzymatic Nucleic Acid
ggtgtaaaggctagctacaacgattatatat

SEQ ID NO: 17463 - DNA, 31 bp, Artificial Sequence
  Description of Artificial Sequence:  Enzymatic Nucleic Acid
taaaggtgggctagctacaacgaaaacttat

SEQ ID NO: 17464 - DNA, 31 bp, Artificial Sequence
  Description of Artificial Sequence:  Enzymatic Nucleic Acid
gataaaggggctagctacaacgagtaaactt

SEQ ID NO: 17465 - DNA, 31 bp, Artificial Sequence
  Description of Artificial Sequence:  Enzymatic Nucleic Acid
tggaaagaggctagctacaacgaaaaggtgt

SEQ ID NO: 17466 - DNA, 31 bp, Artificial Sequence
  Description of Artificial Sequence:  Enzymatic Nucleic Acid
ggctcccaggctagctacaacgaggaaagat

SEQ ID NO: 17467 - DNA, 31 bp, Artificial Sequence
  Description of Artificial Sequence:  Enzymatic Nucleic Acid
gcagctggggctagctacaacgatcccatgg

SEQ ID NO: 17468 - DNA, 31 bp, Artificial Sequence
  Description of Artificial Sequence:  Enzymatic Nucleic Acid
aaaagcagggctagctacaacgatggctccc

SEQ ID NO: 17469 - DNA, 31 bp, Artificial Sequence
  Description of Artificial Sequence:  Enzymatic Nucleic Acid
acaaaaagggctagctacaacgaagctggct

SEQ ID NO: 17470 - DNA, 31 bp, Artificial Sequence
  Description of Artificial Sequence:  Enzymatic Nucleic Acid
aaaaatcaggctagctacaacgaaaaaagca

SEQ ID NO: 17471 - DNA, 31 bp, Artificial Sequence
  Description of Artificial Sequence:  Enzymatic Nucleic Acid
taaaaaaaggctagctacaacgacacaaaaa

SEQ ID NO: 17472 - DNA, 31 bp, Artificial Sequence
  Description of Artificial Sequence:  Enzymatic Nucleic Acid
aagcactaggctagctacaacgataaaaaaa

SEQ ID NO: 17473 - DNA, 31 bp, Artificial Sequence
  Description of Artificial Sequence:  Enzymatic Nucleic Acid
aaaaagcaggctagctacaacgatattaaaa

SEQ ID NO: 17474 - DNA, 31 bp, Artificial Sequence
  Description of Artificial Sequence:  Enzymatic Nucleic Acid
aaaaaaagggctagctacaacgaactattaa

SEQ ID NO: 17475 - DNA, 31 bp, Artificial Sequence
  Description of Artificial Sequence:  Enzymatic Nucleic Acid
cttgttagggctagctacaacgacaaaaaaa

SEQ ID NO: 17476 - DNA, 31 bp, Artificial Sequence
  Description of Artificial Sequence:  Enzymatic Nucleic Acid
cattcttgggctagctacaacgatagtcaaa

SEQ ID NO: 17477 - DNA, 31 bp, Artificial Sequence
  Description of Artificial Sequence:  Enzymatic Nucleic Acid
gagttacaggctagctacaacgatcttgtta

SEQ ID NO: 17478 - DNA, 31 bp, Artificial Sequence
  Description of Artificial Sequence:  Enzymatic Nucleic Acid
tggagttaggctagctacaacgaattcttgt

SEQ ID NO: 17479 - DNA, 31 bp, Artificial Sequence
  Description of Artificial Sequence:  Enzymatic Nucleic Acid
atctggagggctagctacaacgatacattct

SEQ ID NO: 17480 - DNA, 31 bp, Artificial Sequence
  Description of Artificial Sequence:  Enzymatic Nucleic Acid
tttctctaggctagctacaacgactggagtt

SEQ ID NO: 17481 - DNA, 31 bp, Artificial Sequence
  Description of Artificial Sequence:  Enzymatic Nucleic Acid
tgtcactaggctagctacaacgattctctat

SEQ ID NO: 17482 - DNA, 31 bp, Artificial Sequence
  Description of Artificial Sequence:  Enzymatic Nucleic Acid
acttgtcaggctagctacaacgatatttctc

SEQ ID NO: 17483 - DNA, 31 bp, Artificial Sequence
  Description of Artificial Sequence:  Enzymatic Nucleic Acid
ttcacttgggctagctacaacgacactattt

SEQ ID NO: 17484 - DNA, 31 bp, Artificial Sequence
  Description of Artificial Sequence:  Enzymatic Nucleic Acid
gttcttcaggctagctacaacgattgtcact

SEQ ID NO: 17485 - DNA, 31 bp, Artificial Sequence
  Description of Artificial Sequence:  Enzymatic Nucleic Acid
cagtagtgggctagctacaacgatcttcact

SEQ ID NO: 17486 - DNA, 31 bp, Artificial Sequence
  Description of Artificial Sequence:  Enzymatic Nucleic Acid
agcagtagggctagctacaacgagttcttca

SEQ ID NO: 17487 - DNA, 31 bp, Artificial Sequence
  Description of Artificial Sequence:  Enzymatic Nucleic Acid
tttagcagggctagctacaacgaagtgttct

SEQ ID NO: 17488 - DNA, 31 bp, Artificial Sequence
  Description of Artificial Sequence:  Enzymatic Nucleic Acid
ggatttagggctagctacaacgaagtagtgt

SEQ ID NO: 17489 - DNA, 31 bp, Artificial Sequence
  Description of Artificial Sequence:  Enzymatic Nucleic Acid
catgaggaggctagctacaacgattagcagt

SEQ ID NO: 17490 - DNA, 31 bp, Artificial Sequence
  Description of Artificial Sequence:  Enzymatic Nucleic Acid
gagtaacaggctagctacaacgagaggattt

SEQ ID NO: 17491 - DNA, 31 bp, Artificial Sequence
  Description of Artificial Sequence:  Enzymatic Nucleic Acid
ctgagtaaggctagctacaacgaatgaggat

SEQ ID NO: 17492 - DNA, 31 bp, Artificial Sequence
  Description of Artificial Sequence:  Enzymatic Nucleic Acid
acactgagggctagctacaacgaaacatgag

SEQ ID NO: 17493 - DNA, 31 bp, Artificial Sequence
  Description of Artificial Sequence:  Enzymatic Nucleic Acid
ctctaacaggctagctacaacgatgagtaac

SEQ ID NO: 17494 - DNA, 31 bp, Artificial Sequence
  Description of Artificial Sequence:  Enzymatic Nucleic Acid
ttctctaaggctagctacaacgaactgagta

SEQ ID NO: 17495 - DNA, 31 bp, Artificial Sequence
  Description of Artificial Sequence:  Enzymatic Nucleic Acid
aggaaggaggctagctacaacgattctctaa

SEQ ID NO: 17496 - DNA, 31 bp, Artificial Sequence
  Description of Artificial Sequence:  Enzymatic Nucleic Acid
tcattgggggctagctacaacgattaggaag

SEQ ID NO: 17497 - DNA, 31 bp, Artificial Sequence
  Description of Artificial Sequence:  Enzymatic Nucleic Acid
ggaagtcaggctagctacaacgatgggttta

SEQ ID NO: 17498 - DNA, 31 bp, Artificial Sequence
  Description of Artificial Sequence:  Enzymatic Nucleic Acid
cagggaagggctagctacaacgacattgggt

SEQ ID NO: 17499 - DNA, 31 bp, Artificial Sequence
  Description of Artificial Sequence:  Enzymatic Nucleic Acid
ggttggagggctagctacaacgaagggaagt

SEQ ID NO: 17500 - DNA, 31 bp, Artificial Sequence
  Description of Artificial Sequence:  Enzymatic Nucleic Acid
ggcgggggggctagctacaacgatggagcag

SEQ ID NO: 17501 - DNA, 31 bp, Artificial Sequence
  Description of Artificial Sequence:  Enzymatic Nucleic Acid
tgaggtggggctagctacaacgagggggttg

SEQ ID NO: 17502 - DNA, 31 bp, Artificial Sequence
  Description of Artificial Sequence:  Enzymatic Nucleic Acid
ccctgaggggctagctacaacgaggcggggg

SEQ ID NO: 17503 - DNA, 31 bp, Artificial Sequence
  Description of Artificial Sequence:  Enzymatic Nucleic Acid
cctgcgtgggctagctacaacgacctgaggt

SEQ ID NO: 17504 - DNA, 31 bp, Artificial Sequence
  Description of Artificial Sequence:  Enzymatic Nucleic Acid
gtcctgcgggctagctacaacgagccctgag

SEQ ID NO: 17505 - DNA, 31 bp, Artificial Sequence
  Description of Artificial Sequence:  Enzymatic Nucleic Acid
tggtcctgggctagctacaacgagtgccctg

SEQ ID NO: 17506 - DNA, 31 bp, Artificial Sequence
  Description of Artificial Sequence:  Enzymatic Nucleic Acid
caaactggggctagctacaacgacctgcgtg

SEQ ID NO: 17507 - DNA, 31 bp, Artificial Sequence
  Description of Artificial Sequence:  Enzymatic Nucleic Acid
caatcaaaggctagctacaacgatggtcctg

SEQ ID NO: 17508 - DNA, 31 bp, Artificial Sequence
  Description of Artificial Sequence:  Enzymatic Nucleic Acid
ctcctcaaggctagctacaacgacaaactgg

SEQ ID NO: 17509 - DNA, 31 bp, Artificial Sequence
  Description of Artificial Sequence:  Enzymatic Nucleic Acid
cagtgcagggctagctacaacgatcctcaat

SEQ ID NO: 17510 - DNA, 31 bp, Artificial Sequence
  Description of Artificial Sequence:  Enzymatic Nucleic Acid
gatcagtgggctagctacaacgaagctcctc

SEQ ID NO: 17511 - DNA, 31 bp, Artificial Sequence
  Description of Artificial Sequence:  Enzymatic Nucleic Acid
gtgatcagggctagctacaacgagcagctcc

SEQ ID NO: 17512 - DNA, 31 bp, Artificial Sequence
  Description of Artificial Sequence:  Enzymatic Nucleic Acid
ttgggtgaggctagctacaacgacagtgcag

SEQ ID NO: 17513 - DNA, 31 bp, Artificial Sequence
  Description of Artificial Sequence:  Enzymatic Nucleic Acid
gcattgggggctagctacaacgagatcagtg

SEQ ID NO: 17514 - DNA, 31 bp, Artificial Sequence
  Description of Artificial Sequence:  Enzymatic Nucleic Acid
gtgatgcaggctagctacaacgatgggtgat

SEQ ID NO: 17515 - DNA, 31 bp, Artificial Sequence
  Description of Artificial Sequence:  Enzymatic Nucleic Acid
acgtgatgggctagctacaacgaattgggtg

SEQ ID NO: 17516 - DNA, 31 bp, Artificial Sequence
  Description of Artificial Sequence:  Enzymatic Nucleic Acid
gtacgtgaggctagctacaacgagcattggg

SEQ ID NO: 17517 - DNA, 31 bp, Artificial Sequence
  Description of Artificial Sequence:  Enzymatic Nucleic Acid
ggggtacgggctagctacaacgagatgcatt

SEQ ID NO: 17518 - DNA, 31 bp, Artificial Sequence
  Description of Artificial Sequence:  Enzymatic Nucleic Acid
gtggggtaggctagctacaacgagtgatgca

SEQ ID NO: 17519 - DNA, 31 bp, Artificial Sequence
  Description of Artificial Sequence:  Enzymatic Nucleic Acid
cagtggggggctagctacaacgaacgtgatg

SEQ ID NO: 17520 - DNA, 31 bp, Artificial Sequence
  Description of Artificial Sequence:  Enzymatic Nucleic Acid
tggcccagggctagctacaacgaggggtacg

SEQ ID NO: 17521 - DNA, 31 bp, Artificial Sequence
  Description of Artificial Sequence:  Enzymatic Nucleic Acid
agggctggggctagctacaacgaccagtggg

SEQ ID NO: 17522 - DNA, 31 bp, Artificial Sequence
  Description of Artificial Sequence:  Enzymatic Nucleic Acid
ctgcagggggctagctacaacgatggcccag

SEQ ID NO: 17523 - DNA, 31 bp, Artificial Sequence
  Description of Artificial Sequence:  Enzymatic Nucleic Acid
ttgggctgggctagctacaacgaagggctgg

SEQ ID NO: 17524 - DNA, 31 bp, Artificial Sequence
  Description of Artificial Sequence:  Enzymatic Nucleic Acid
gttttgggggctagctacaacgatgcagggc

SEQ ID NO: 17525 - DNA, 31 bp, Artificial Sequence
  Description of Artificial Sequence:  Enzymatic Nucleic Acid
gccctgggggctagctacaacgatttgggct

SEQ ID NO: 17526 - DNA, 31 bp, Artificial Sequence
  Description of Artificial Sequence:  Enzymatic Nucleic Acid
gcttgttgggctagctacaacgacctgggtt

SEQ ID NO: 17527 - DNA, 31 bp, Artificial Sequence
  Description of Artificial Sequence:  Enzymatic Nucleic Acid
cgggcttgggctagctacaacgatgccctgg

SEQ ID NO: 17528 - DNA, 31 bp, Artificial Sequence
  Description of Artificial Sequence:  Enzymatic Nucleic Acid
ctaacgggggctagctacaacgattgttgcc

SEQ ID NO: 17529 - DNA, 31 bp, Artificial Sequence
  Description of Artificial Sequence:  Enzymatic Nucleic Acid
ggggctaaggctagctacaacgagggcttgt

SEQ ID NO: 17530 - DNA, 31 bp, Artificial Sequence
  Description of Artificial Sequence:  Enzymatic Nucleic Acid
ccctggggggctagctacaacgataacgggc

SEQ ID NO: 17531 - DNA, 31 bp, Artificial Sequence
  Description of Artificial Sequence:  Enzymatic Nucleic Acid
gccagtgaggctagctacaacgacccctggg

SEQ ID NO: 17532 - DNA, 31 bp, Artificial Sequence
  Description of Artificial Sequence:  Enzymatic Nucleic Acid
ccagccagggctagctacaacgagatcccct

SEQ ID NO: 17533 - DNA, 31 bp, Artificial Sequence
  Description of Artificial Sequence:  Enzymatic Nucleic Acid
caggccagggctagctacaacgacagtgatc

SEQ ID NO: 17534 - DNA, 31 bp, Artificial Sequence
  Description of Artificial Sequence:  Enzymatic Nucleic Acid
tgctcaggggctagctacaacgacagccagt

SEQ ID NO: 17535 - DNA, 31 bp, Artificial Sequence
  Description of Artificial Sequence:  Enzymatic Nucleic Acid
agatgttgggctagctacaacgatcaggcca

SEQ ID NO: 17536 - DNA, 31 bp, Artificial Sequence
  Description of Artificial Sequence:  Enzymatic Nucleic Acid
ccgagatgggctagctacaacgatgctcagg

SEQ ID NO: 17537 - DNA, 31 bp, Artificial Sequence
  Description of Artificial Sequence:  Enzymatic Nucleic Acid
tcccgagaggctagctacaacgagttgctca

SEQ ID NO: 17538 - DNA, 31 bp, Artificial Sequence
  Description of Artificial Sequence:  Enzymatic Nucleic Acid
ctagaggaggctagctacaacgatcccgaga

SEQ ID NO: 17539 - DNA, 31 bp, Artificial Sequence
  Description of Artificial Sequence:  Enzymatic Nucleic Acid
taggcctgggctagctacaacgatagaggac

SEQ ID NO: 17540 - DNA, 31 bp, Artificial Sequence
  Description of Artificial Sequence:  Enzymatic Nucleic Acid
gtcttaggggctagctacaacgactgctaga

SEQ ID NO: 17541 - DNA, 31 bp, Artificial Sequence
  Description of Artificial Sequence:  Enzymatic Nucleic Acid
ctcacatgggctagctacaacgacttaggcc

SEQ ID NO: 17542 - DNA, 31 bp, Artificial Sequence
  Description of Artificial Sequence:  Enzymatic Nucleic Acid
tcctcacaggctagctacaacgagtcttagg

SEQ ID NO: 17543 - DNA, 31 bp, Artificial Sequence
  Description of Artificial Sequence:  Enzymatic Nucleic Acid
cctcctcaggctagctacaacgaatgtctta

SEQ ID NO: 17544 - DNA, 31 bp, Artificial Sequence
  Description of Artificial Sequence:  Enzymatic Nucleic Acid
gctttttgggctagctacaacgatttttttc

SEQ ID NO: 17545 - DNA, 31 bp, Artificial Sequence
  Description of Artificial Sequence:  Enzymatic Nucleic Acid
ctcccttgggctagctacaacgatttttgct

SEQ ID NO: 17546 - DNA, 31 bp, Artificial Sequence
  Description of Artificial Sequence:  Enzymatic Nucleic Acid
tctcccggggctagctacaacgattctcttt

SEQ ID NO: 17547 - DNA, 31 bp, Artificial Sequence
  Description of Artificial Sequence:  Enzymatic Nucleic Acid
ttctcatgggctagctacaacgacttctccc

SEQ ID NO: 17548 - DNA, 31 bp, Artificial Sequence
  Description of Artificial Sequence:  Enzymatic Nucleic Acid
ctttctcaggctagctacaacgagccttctc

SEQ ID NO: 17549 - DNA, 31 bp, Artificial Sequence
  Description of Artificial Sequence:  Enzymatic Nucleic Acid
gtctcaaaggctagctacaacgatctttctc

SEQ ID NO: 17550 - DNA, 31 bp, Artificial Sequence
  Description of Artificial Sequence:  Enzymatic Nucleic Acid
atggtgcgggctagctacaacgactcaaatt

SEQ ID NO: 17551 - DNA, 31 bp, Artificial Sequence
  Description of Artificial Sequence:  Enzymatic Nucleic Acid
acatggtgggctagctacaacgagtctcaaa

SEQ ID NO: 17552 - DNA, 31 bp, Artificial Sequence
  Description of Artificial Sequence:  Enzymatic Nucleic Acid
ccacatggggctagctacaacgagcgtctca

SEQ ID NO: 17553 - DNA, 31 bp, Artificial Sequence
  Description of Artificial Sequence:  Enzymatic Nucleic Acid
tgcccacaggctagctacaacgaggtgcgtc

SEQ ID NO: 17554 - DNA, 31 bp, Artificial Sequence
  Description of Artificial Sequence:  Enzymatic Nucleic Acid
cgtgcccaggctagctacaacgaatggtgcg

SEQ ID NO: 17555 - DNA, 31 bp, Artificial Sequence
  Description of Artificial Sequence:  Enzymatic Nucleic Acid
cctccgtgggctagctacaacgaccacatgg

SEQ ID NO: 17556 - DNA, 31 bp, Artificial Sequence
  Description of Artificial Sequence:  Enzymatic Nucleic Acid
cccctccgggctagctacaacgagcccacat

SEQ ID NO: 17557 - DNA, 31 bp, Artificial Sequence
  Description of Artificial Sequence:  Enzymatic Nucleic Acid
gagccccgggctagctacaacgaccccctcc

SEQ ID NO: 17558 - DNA, 31 bp, Artificial Sequence
  Description of Artificial Sequence:  Enzymatic Nucleic Acid
ttgctgagggctagctacaacgacccgtccc

SEQ ID NO: 17559 - DNA, 31 bp, Artificial Sequence
  Description of Artificial Sequence:  Enzymatic Nucleic Acid
tggcattgggctagctacaacgatgagcccc

SEQ ID NO: 17560 - DNA, 31 bp, Artificial Sequence
  Description of Artificial Sequence:  Enzymatic Nucleic Acid
aaatggcaggctagctacaacgatgctgagc

SEQ ID NO: 17561 - DNA, 31 bp, Artificial Sequence
  Description of Artificial Sequence:  Enzymatic Nucleic Acid
tgaaatggggctagctacaacgaattgctga

SEQ ID NO: 17562 - DNA, 31 bp, Artificial Sequence
  Description of Artificial Sequence:  Enzymatic Nucleic Acid
cactgaaaggctagctacaacgaggcattgc

SEQ ID NO: 17563 - DNA, 31 bp, Artificial Sequence
  Description of Artificial Sequence:  Enzymatic Nucleic Acid
ggaagccaggctagctacaacgatgaaatgg

SEQ ID NO: 17564 - DNA, 31 bp, Artificial Sequence
  Description of Artificial Sequence:  Enzymatic Nucleic Acid
ctgggaagggctagctacaacgacactgaaa

SEQ ID NO: 17565 - DNA, 31 bp, Artificial Sequence
  Description of Artificial Sequence:  Enzymatic Nucleic Acid
ggtcagagggctagctacaacgatgggaagc

SEQ ID NO: 17566 - DNA, 31 bp, Artificial Sequence
  Description of Artificial Sequence:  Enzymatic Nucleic Acid
tagaagggggctagctacaacgacagagctg

SEQ ID NO: 17567 - DNA, 31 bp, Artificial Sequence
  Description of Artificial Sequence:  Enzymatic Nucleic Acid
ctcaaatgggctagctacaacgaagaagggt

SEQ ID NO: 17568 - DNA, 31 bp, Artificial Sequence
  Description of Artificial Sequence:  Enzymatic Nucleic Acid
ccctcaaaggctagctacaacgagtagaagg

SEQ ID NO: 17569 - DNA, 31 bp, Artificial Sequence
  Description of Artificial Sequence:  Enzymatic Nucleic Acid
tggctgggggctagctacaacgacctcaaat

SEQ ID NO: 17570 - DNA, 31 bp, Artificial Sequence
  Description of Artificial Sequence:  Enzymatic Nucleic Acid
gctcctggggctagctacaacgatgggccct

SEQ ID NO: 17571 - DNA, 31 bp, Artificial Sequence
  Description of Artificial Sequence:  Enzymatic Nucleic Acid
tccatctgggctagctacaacgatcctggct

SEQ ID NO: 17572 - DNA, 31 bp, Artificial Sequence
  Description of Artificial Sequence:  Enzymatic Nucleic Acid
gctgtccaggctagctacaacgactgctcct

SEQ ID NO: 17573 - DNA, 31 bp, Artificial Sequence
  Description of Artificial Sequence:  Enzymatic Nucleic Acid
catcgctgggctagctacaacgaccatctgc

SEQ ID NO: 17574 - DNA, 31 bp, Artificial Sequence
  Description of Artificial Sequence:  Enzymatic Nucleic Acid
cctcatcgggctagctacaacgatgtccatc

SEQ ID NO: 17575 - DNA, 31 bp, Artificial Sequence
  Description of Artificial Sequence:  Enzymatic Nucleic Acid
tcccctcaggctagctacaacgacgctgtcc

SEQ ID NO: 17576 - DNA, 31 bp, Artificial Sequence
  Description of Artificial Sequence:  Enzymatic Nucleic Acid
agaaaatgggctagctacaacgacccctcat

SEQ ID NO: 17577 - DNA, 31 bp, Artificial Sequence
  Description of Artificial Sequence:  Enzymatic Nucleic Acid
ccagaaaaggctagctacaacgagtcccctc

SEQ ID NO: 17578 - DNA, 31 bp, Artificial Sequence
  Description of Artificial Sequence:  Enzymatic Nucleic Acid
tcccagaaggctagctacaacgaccagaaaa

SEQ ID NO: 17579 - DNA, 31 bp, Artificial Sequence
  Description of Artificial Sequence:  Enzymatic Nucleic Acid
ttttcttgggctagctacaacgactcccaga

SEQ ID NO: 17580 - DNA, 31 bp, Artificial Sequence
  Description of Artificial Sequence:  Enzymatic Nucleic Acid
gatatttgggctagctacaacgaccttttct

SEQ ID NO: 17581 - DNA, 31 bp, Artificial Sequence
  Description of Artificial Sequence:  Enzymatic Nucleic Acid
aaaagataggctagctacaacgattgtcctt

SEQ ID NO: 17582 - DNA, 31 bp, Artificial Sequence
  Description of Artificial Sequence:  Enzymatic Nucleic Acid
aaaaaagaggctagctacaacgaatttgtcc

SEQ ID NO: 17583 - DNA, 31 bp, Artificial Sequence
  Description of Artificial Sequence:  Enzymatic Nucleic Acid
tgctttagggctagctacaacgatccaaaaa

SEQ ID NO: 17584 - DNA, 31 bp, Artificial Sequence
  Description of Artificial Sequence:  Enzymatic Nucleic Acid
aaaatttgggctagctacaacgatttagttc

SEQ ID NO: 17585 - DNA, 31 bp, Artificial Sequence
  Description of Artificial Sequence:  Enzymatic Nucleic Acid
gtctaaaaggctagctacaacgattgcttta

SEQ ID NO: 17586 - DNA, 31 bp, Artificial Sequence
  Description of Artificial Sequence:  Enzymatic Nucleic Acid
ggtaaaggggctagctacaacgactaaaatt

SEQ ID NO: 17587 - DNA, 31 bp, Artificial Sequence
  Description of Artificial Sequence:  Enzymatic Nucleic Acid
tccataggggctagctacaacgaaaaggtct

SEQ ID NO: 17588 - DNA, 31 bp, Artificial Sequence
  Description of Artificial Sequence:  Enzymatic Nucleic Acid
cacttccaggctagctacaacgaaggtaaag

SEQ ID NO: 17589 - DNA, 31 bp, Artificial Sequence
  Description of Artificial Sequence:  Enzymatic Nucleic Acid
tagaaccaggctagctacaacgattccatag

SEQ ID NO: 17590 - DNA, 31 bp, Artificial Sequence
  Description of Artificial Sequence:  Enzymatic Nucleic Acid
acatagaaggctagctacaacgacacttcca

SEQ ID NO: 17591 - DNA, 31 bp, Artificial Sequence
  Description of Artificial Sequence:  Enzymatic Nucleic Acid
aatggacaggctagctacaacgaagaaccac

SEQ ID NO: 17592 - DNA, 31 bp, Artificial Sequence
  Description of Artificial Sequence:  Enzymatic Nucleic Acid
agaatggaggctagctacaacgaatagaacc

SEQ ID NO: 17593 - DNA, 31 bp, Artificial Sequence
  Description of Artificial Sequence:  Enzymatic Nucleic Acid
aatgagaaggctagctacaacgaggacatag

SEQ ID NO: 17594 - DNA, 31 bp, Artificial Sequence
  Description of Artificial Sequence:  Enzymatic Nucleic Acid
gccacgaaggctagctacaacgagagaatgg

SEQ ID NO: 17595 - DNA, 31 bp, Artificial Sequence
  Description of Artificial Sequence:  Enzymatic Nucleic Acid
acatgccaggctagctacaacgagaatgaga

SEQ ID NO: 17596 - DNA, 31 bp, Artificial Sequence
  Description of Artificial Sequence:  Enzymatic Nucleic Acid
aaaacatgggctagctacaacgacacgaatg

SEQ ID NO: 17597 - DNA, 31 bp, Artificial Sequence
  Description of Artificial Sequence:  Enzymatic Nucleic Acid
tcaaaacaggctagctacaacgagccacgaa

SEQ ID NO: 17598 - DNA, 31 bp, Artificial Sequence
  Description of Artificial Sequence:  Enzymatic Nucleic Acid
aatcaaaaggctagctacaacgaatgccacg

SEQ ID NO: 17599 - DNA, 31 bp, Artificial Sequence
  Description of Artificial Sequence:  Enzymatic Nucleic Acid
gctacaaaggctagctacaacgacaaaacat

SEQ ID NO: 17600 - DNA, 31 bp, Artificial Sequence
  Description of Artificial Sequence:  Enzymatic Nucleic Acid
cagtgctaggctagctacaacgaaaatcaaa

SEQ ID NO: 17601 - DNA, 31 bp, Artificial Sequence
  Description of Artificial Sequence:  Enzymatic Nucleic Acid
cctcagtgggctagctacaacgatacaaatc

SEQ ID NO: 17602 - DNA, 31 bp, Artificial Sequence
  Description of Artificial Sequence:  Enzymatic Nucleic Acid
accctcagggctagctacaacgagctacaaa

SEQ ID NO: 17603 - DNA, 31 bp, Artificial Sequence
  Description of Artificial Sequence:  Enzymatic Nucleic Acid
gagtgccaggctagctacaacgacctcagtg

SEQ ID NO: 17604 - DNA, 31 bp, Artificial Sequence
  Description of Artificial Sequence:  Enzymatic Nucleic Acid
gttgagtgggctagctacaacgacaccctca

SEQ ID NO: 17605 - DNA, 31 bp, Artificial Sequence
  Description of Artificial Sequence:  Enzymatic Nucleic Acid
gagttgagggctagctacaacgagccaccct

SEQ ID NO: 17606 - DNA, 31 bp, Artificial Sequence
  Description of Artificial Sequence:  Enzymatic Nucleic Acid
gctcagagggctagctacaacgatgagtgcc

SEQ ID NO: 17607 - DNA, 31 bp, Artificial Sequence
  Description of Artificial Sequence:  Enzymatic Nucleic Acid
agtatgggggctagctacaacgatcagagtt

SEQ ID NO: 17608 - DNA, 31 bp, Artificial Sequence
  Description of Artificial Sequence:  Enzymatic Nucleic Acid
caaaagtaggctagctacaacgagggctcag

SEQ ID NO: 17609 - DNA, 31 bp, Artificial Sequence
  Description of Artificial Sequence:  Enzymatic Nucleic Acid
gccaaaagggctagctacaacgaatgggctc

SEQ ID NO: 17610 - DNA, 31 bp, Artificial Sequence
  Description of Artificial Sequence:  Enzymatic Nucleic Acid
tagaggagggctagctacaacgacaaaagta

SEQ ID NO: 17611 - DNA, 31 bp, Artificial Sequence
  Description of Artificial Sequence:  Enzymatic Nucleic Acid
gcatcttaggctagctacaacgatagaggag

SEQ ID NO: 17612 - DNA, 31 bp, Artificial Sequence
  Description of Artificial Sequence:  Enzymatic Nucleic Acid
tcagtgcaggctagctacaacgacttactag

SEQ ID NO: 17613 - DNA, 31 bp, Artificial Sequence
  Description of Artificial Sequence:  Enzymatic Nucleic Acid
tttcagtgggctagctacaacgaatcttact

SEQ ID NO: 17614 - DNA, 31 bp, Artificial Sequence
  Description of Artificial Sequence:  Enzymatic Nucleic Acid
gttttcagggctagctacaacgagcatctta

SEQ ID NO: 17615 - DNA, 31 bp, Artificial Sequence
  Description of Artificial Sequence:  Enzymatic Nucleic Acid
tggctaagggctagctacaacgatttcagtg

SEQ ID NO: 17616 - DNA, 31 bp, Artificial Sequence
  Description of Artificial Sequence:  Enzymatic Nucleic Acid
aactctggggctagctacaacgataagtttt

SEQ ID NO: 17617 - DNA, 31 bp, Artificial Sequence
  Description of Artificial Sequence:  Enzymatic Nucleic Acid
caacctaaggctagctacaacgatctggcta

SEQ ID NO: 17618 - DNA, 31 bp, Artificial Sequence
  Description of Artificial Sequence:  Enzymatic Nucleic Acid
ggagacaaggctagctacaacgactaactct

SEQ ID NO: 17619 - DNA, 31 bp, Artificial Sequence
  Description of Artificial Sequence:  Enzymatic Nucleic Acid
cctggagaggctagctacaacgaaacctaac

SEQ ID NO: 17620 - DNA, 31 bp, Artificial Sequence
  Description of Artificial Sequence:  Enzymatic Nucleic Acid
catcatggggctagctacaacgactggagac

SEQ ID NO: 17621 - DNA, 31 bp, Artificial Sequence
  Description of Artificial Sequence:  Enzymatic Nucleic Acid
ggccatcaggctagctacaacgaggcctgga

SEQ ID NO: 17622 - DNA, 31 bp, Artificial Sequence
  Description of Artificial Sequence:  Enzymatic Nucleic Acid
taaggccaggctagctacaacgacatggcct

SEQ ID NO: 17623 - DNA, 31 bp, Artificial Sequence
  Description of Artificial Sequence:  Enzymatic Nucleic Acid
gtgtaaggggctagctacaacgacatcatgg

SEQ ID NO: 17624 - DNA, 31 bp, Artificial Sequence
  Description of Artificial Sequence:  Enzymatic Nucleic Acid
tttcagtgggctagctacaacgaaaggccat

SEQ ID NO: 17625 - DNA, 31 bp, Artificial Sequence
  Description of Artificial Sequence:  Enzymatic Nucleic Acid
attttcagggctagctacaacgagtaaggcc

SEQ ID NO: 17626 - DNA, 31 bp, Artificial Sequence
  Description of Artificial Sequence:  Enzymatic Nucleic Acid
atgtgacaggctagctacaacgatttcagtg

SEQ ID NO: 17627 - DNA, 31 bp, Artificial Sequence
  Description of Artificial Sequence:  Enzymatic Nucleic Acid
gaatgtgaggctagctacaacgaattttcag

SEQ ID NO: 17628 - DNA, 31 bp, Artificial Sequence
  Description of Artificial Sequence:  Enzymatic Nucleic Acid
atagaatgggctagctacaacgagacatttt

SEQ ID NO: 17629 - DNA, 31 bp, Artificial Sequence
  Description of Artificial Sequence:  Enzymatic Nucleic Acid
aaatagaaggctagctacaacgagtgacatt

SEQ ID NO: 17630 - DNA, 31 bp, Artificial Sequence
  Description of Artificial Sequence:  Enzymatic Nucleic Acid
acccaaaaggctagctacaacgaagaatgtg

SEQ ID NO: 17631 - DNA, 31 bp, Artificial Sequence
  Description of Artificial Sequence:  Enzymatic Nucleic Acid
tattaataggctagctacaacgaccaaaata

SEQ ID NO: 17632 - DNA, 31 bp, Artificial Sequence
  Description of Artificial Sequence:  Enzymatic Nucleic Acid
tatattaaggctagctacaacgaacccaaaa

SEQ ID NO: 17633 - DNA, 31 bp, Artificial Sequence
  Description of Artificial Sequence:  Enzymatic Nucleic Acid
actatataggctagctacaacgataataccc

SEQ ID NO: 17634 - DNA, 31 bp, Artificial Sequence
  Description of Artificial Sequence:  Enzymatic Nucleic Acid
ggactataggctagctacaacgaattaatac

SEQ ID NO: 17635 - DNA, 31 bp, Artificial Sequence
  Description of Artificial Sequence:  Enzymatic Nucleic Acid
ctggactaggctagctacaacgaatattaat

SEQ ID NO: 17636 - DNA, 31 bp, Artificial Sequence
  Description of Artificial Sequence:  Enzymatic Nucleic Acid
tgtctggaggctagctacaacgatatatatt

SEQ ID NO: 17637 - DNA, 31 bp, Artificial Sequence
  Description of Artificial Sequence:  Enzymatic Nucleic Acid
gttaagtgggctagctacaacgactggacta

SEQ ID NO: 17638 - DNA, 31 bp, Artificial Sequence
  Description of Artificial Sequence:  Enzymatic Nucleic Acid
gagttaagggctagctacaacgagtctggac

SEQ ID NO: 17639 - DNA, 31 bp, Artificial Sequence
  Description of Artificial Sequence:  Enzymatic Nucleic Acid
aaattgagggctagctacaacgataagtgtc

SEQ ID NO: 17640 - DNA, 31 bp, Artificial Sequence
  Description of Artificial Sequence:  Enzymatic Nucleic Acid
ccaagaaaggctagctacaacgatgagttaa

SEQ ID NO: 17641 - DNA, 31 bp, Artificial Sequence
  Description of Artificial Sequence:  Enzymatic Nucleic Acid
gaataataggctagctacaacgacaagaaat

SEQ ID NO: 17642 - DNA, 31 bp, Artificial Sequence
  Description of Artificial Sequence:  Enzymatic Nucleic Acid
cagaataaggctagctacaacgaaccaagaa

SEQ ID NO: 17643 - DNA, 31 bp, Artificial Sequence
  Description of Artificial Sequence:  Enzymatic Nucleic Acid
aaacagaaggctagctacaacgaaataccaa

SEQ ID NO: 17644 - DNA, 31 bp, Artificial Sequence
  Description of Artificial Sequence:  Enzymatic Nucleic Acid
gtgcaaaaggctagctacaacgaagaataat

SEQ ID NO: 17645 - DNA, 31 bp, Artificial Sequence
  Description of Artificial Sequence:  Enzymatic Nucleic Acid
taactgtgggctagctacaacgaaaaacaga

SEQ ID NO: 17646 - DNA, 31 bp, Artificial Sequence
  Description of Artificial Sequence:  Enzymatic Nucleic Acid
actaactgggctagctacaacgagcaaaaca

SEQ ID NO: 17647 - DNA, 31 bp, Artificial Sequence
  Description of Artificial Sequence:  Enzymatic Nucleic Acid
acaactaaggctagctacaacgatgtgcaaa

SEQ ID NO: 17648 - DNA, 31 bp, Artificial Sequence
  Description of Artificial Sequence:  Enzymatic Nucleic Acid
tttcacaaggctagctacaacgataactgtg

SEQ ID NO: 17649 - DNA, 31 bp, Artificial Sequence
  Description of Artificial Sequence:  Enzymatic Nucleic Acid
ttctttcaggctagctacaacgaaactaact

SEQ ID NO: 17650 - DNA, 31 bp, Artificial Sequence
  Description of Artificial Sequence:  Enzymatic Nucleic Acid
cttctcagggctagctacaacgatttctttc

SEQ ID NO: 17651 - DNA, 31 bp, Artificial Sequence
  Description of Artificial Sequence:  Enzymatic Nucleic Acid
cattttcaggctagctacaacgatcttctca

SEQ ID NO: 17652 - DNA, 31 bp, Artificial Sequence
  Description of Artificial Sequence:  Enzymatic Nucleic Acid
ggactgcaggctagctacaacgatttcattc

SEQ ID NO: 17653 - DNA, 31 bp, Artificial Sequence
  Description of Artificial Sequence:  Enzymatic Nucleic Acid
caggactgggctagctacaacgaattttcat

SEQ ID NO: 17654 - DNA, 31 bp, Artificial Sequence
  Description of Artificial Sequence:  Enzymatic Nucleic Acid
cctcaggaggctagctacaacgatgcatttt

SEQ ID NO: 17655 - DNA, 31 bp, Artificial Sequence
  Description of Artificial Sequence:  Enzymatic Nucleic Acid
ggagaaaaggctagctacaacgatctcctca

SEQ ID NO: 17656 - DNA, 31 bp, Artificial Sequence
  Description of Artificial Sequence:  Enzymatic Nucleic Acid
ttttgataggctagctacaacgaggagaaaa

SEQ ID NO: 17657 - DNA, 31 bp, Artificial Sequence
  Description of Artificial Sequence:  Enzymatic Nucleic Acid
cgttttgaggctagctacaacgaatggagaa

SEQ ID NO: 17658 - DNA, 31 bp, Artificial Sequence
  Description of Artificial Sequence:  Enzymatic Nucleic Acid
agccctcgggctagctacaacgatttgatat

SEQ ID NO: 17659 - DNA, 31 bp, Artificial Sequence
  Description of Artificial Sequence:  Enzymatic Nucleic Acid
tccatcagggctagctacaacgacctcgttt

SEQ ID NO: 17660 - DNA, 31 bp, Artificial Sequence
  Description of Artificial Sequence:  Enzymatic Nucleic Acid
ttcctccaggctagctacaacgacagccctc

SEQ ID NO: 17661 - DNA, 31 bp, Artificial Sequence
  Description of Artificial Sequence:  Enzymatic Nucleic Acid
cttattgaggctagctacaacgactttttcc

SEQ ID NO: 17662 - DNA, 31 bp, Artificial Sequence
  Description of Artificial Sequence:  Enzymatic Nucleic Acid
tgaccttaggctagctacaacgatgaccttt

SEQ ID NO: 17663 - DNA, 31 bp, Artificial Sequence
  Description of Artificial Sequence:  Enzymatic Nucleic Acid
tcccttgaggctagctacaacgacttattga

SEQ ID NO: 17664 - DNA, 31 bp, Artificial Sequence
  Description of Artificial Sequence:  Enzymatic Nucleic Acid
agacggggggctagctacaacgacttccctt

SEQ ID NO: 17665 - DNA, 31 bp, Artificial Sequence
  Description of Artificial Sequence:  Enzymatic Nucleic Acid
tatagagaggctagctacaacgaggggtctt

SEQ ID NO: 17666 - DNA, 31 bp, Artificial Sequence
  Description of Artificial Sequence:  Enzymatic Nucleic Acid
ggttggtaggctagctacaacgaagagacgg

SEQ ID NO: 17667 - DNA, 31 bp, Artificial Sequence
  Description of Artificial Sequence:  Enzymatic Nucleic Acid
ttggttggggctagctacaacgaatagagac

SEQ ID NO: 17668 - DNA, 31 bp, Artificial Sequence
  Description of Artificial Sequence:  Enzymatic Nucleic Acid
tggtttggggctagctacaacgatggtatag

SEQ ID NO: 17669 - DNA, 31 bp, Artificial Sequence
  Description of Artificial Sequence:  Enzymatic Nucleic Acid
tgaattggggctagctacaacgattggttgg

SEQ ID NO: 17670 - DNA, 31 bp, Artificial Sequence
  Description of Artificial Sequence:  Enzymatic Nucleic Acid
ttggtgaaggctagctacaacgatggtttgg

SEQ ID NO: 17671 - DNA, 31 bp, Artificial Sequence
  Description of Artificial Sequence:  Enzymatic Nucleic Acid
tgtgttggggctagctacaacgagaattggt

SEQ ID NO: 17672 - DNA, 31 bp, Artificial Sequence
  Description of Artificial Sequence:  Enzymatic Nucleic Acid
caactgtgggctagctacaacgatggtgaat

SEQ ID NO: 17673 - DNA, 31 bp, Artificial Sequence
  Description of Artificial Sequence:  Enzymatic Nucleic Acid
cccaactgggctagctacaacgagttggtga

SEQ ID NO: 17674 - DNA, 31 bp, Artificial Sequence
  Description of Artificial Sequence:  Enzymatic Nucleic Acid
ggtcccaaggctagctacaacgatgtgttgg

SEQ ID NO: 17675 - DNA, 31 bp, Artificial Sequence
  Description of Artificial Sequence:  Enzymatic Nucleic Acid
gttttgggggctagctacaacgacccaactg

SEQ ID NO: 17676 - DNA, 31 bp, Artificial Sequence
  Description of Artificial Sequence:  Enzymatic Nucleic Acid
ttcctgtgggctagctacaacgatttgggtc

SEQ ID NO: 17677 - DNA, 31 bp, Artificial Sequence
  Description of Artificial Sequence:  Enzymatic Nucleic Acid
acttcctgggctagctacaacgagttttggg

SEQ ID NO: 17678 - DNA, 31 bp, Artificial Sequence
  Description of Artificial Sequence:  Enzymatic Nucleic Acid
gtgactgaggctagctacaacgattcctgtg

SEQ ID NO: 17679 - DNA, 31 bp, Artificial Sequence
  Description of Artificial Sequence:  Enzymatic Nucleic Acid
aaacgtgaggctagctacaacgatgacttcc

SEQ ID NO: 17680 - DNA, 31 bp, Artificial Sequence
  Description of Artificial Sequence:  Enzymatic Nucleic Acid
aggaaacgggctagctacaacgagactgact

SEQ ID NO: 17681 - DNA, 31 bp, Artificial Sequence
  Description of Artificial Sequence:  Enzymatic Nucleic Acid
aaaggaaaggctagctacaacgagtgactga

SEQ ID NO: 17682 - DNA, 31 bp, Artificial Sequence
  Description of Artificial Sequence:  Enzymatic Nucleic Acid
ccattaaaggctagctacaacgagaaaagga

SEQ ID NO: 17683 - DNA, 31 bp, Artificial Sequence
  Description of Artificial Sequence:  Enzymatic Nucleic Acid
aatccccaggctagctacaacgataaatgaa

SEQ ID NO: 17684 - DNA, 31 bp, Artificial Sequence
  Description of Artificial Sequence:  Enzymatic Nucleic Acid
tagtggaaggctagctacaacgaccccatta

SEQ ID NO: 17685 - DNA, 31 bp, Artificial Sequence
  Description of Artificial Sequence:  Enzymatic Nucleic Acid
tgagatagggctagctacaacgaggaatccc

SEQ ID NO: 17686 - DNA, 31 bp, Artificial Sequence
  Description of Artificial Sequence:  Enzymatic Nucleic Acid
gtgtgagaggctagctacaacgaagtggaat

SEQ ID NO: 17687 - DNA, 31 bp, Artificial Sequence
  Description of Artificial Sequence:  Enzymatic Nucleic Acid
gattagtgggctagctacaacgagagatagt

SEQ ID NO: 17688 - DNA, 31 bp, Artificial Sequence
  Description of Artificial Sequence:  Enzymatic Nucleic Acid
cagattagggctagctacaacgagtgagata

SEQ ID NO: 17689 - DNA, 31 bp, Artificial Sequence
  Description of Artificial Sequence:  Enzymatic Nucleic Acid
ctttcagaggctagctacaacgatagtgtga

SEQ ID NO: 17690 - DNA, 31 bp, Artificial Sequence
  Description of Artificial Sequence:  Enzymatic Nucleic Acid
cttccacaggctagctacaacgacctttcag

SEQ ID NO: 17691 - DNA, 31 bp, Artificial Sequence
  Description of Artificial Sequence:  Enzymatic Nucleic Acid
ctcttccaggctagctacaacgaatcctttc

SEQ ID NO: 17692 - DNA, 31 bp, Artificial Sequence
  Description of Artificial Sequence:  Enzymatic Nucleic Acid
agctaatgggctagctacaacgatcttccac

SEQ ID NO: 17693 - DNA, 31 bp, Artificial Sequence
  Description of Artificial Sequence:  Enzymatic Nucleic Acid
ccagctaaggctagctacaacgagctcttcc

SEQ ID NO: 17694 - DNA, 31 bp, Artificial Sequence
  Description of Artificial Sequence:  Enzymatic Nucleic Acid
tgcgccagggctagctacaacgataatgctc

SEQ ID NO: 17695 - DNA, 31 bp, Artificial Sequence
  Description of Artificial Sequence:  Enzymatic Nucleic Acid
aatatgcgggctagctacaacgacagctaat

SEQ ID NO: 17696 - DNA, 31 bp, Artificial Sequence
  Description of Artificial Sequence:  Enzymatic Nucleic Acid
ttaatatgggctagctacaacgagccagcta

SEQ ID NO: 17697 - DNA, 31 bp, Artificial Sequence
  Description of Artificial Sequence:  Enzymatic Nucleic Acid
gcttaataggctagctacaacgagcgccagc

SEQ ID NO: 17698 - DNA, 31 bp, Artificial Sequence
  Description of Artificial Sequence:  Enzymatic Nucleic Acid
gtgcttaaggctagctacaacgaatgcgcca

SEQ ID NO: 17699 - DNA, 31 bp, Artificial Sequence
  Description of Artificial Sequence:  Enzymatic Nucleic Acid
ttaaagtgggctagctacaacgattaatatg

SEQ ID NO: 17700 - DNA, 31 bp, Artificial Sequence
  Description of Artificial Sequence:  Enzymatic Nucleic Acid
gcttaaagggctagctacaacgagcttaata

SEQ ID NO: 17701 - DNA, 31 bp, Artificial Sequence
  Description of Artificial Sequence:  Enzymatic Nucleic Acid
tcaaggagggctagctacaacgattaaagtg

SEQ ID NO: 17702 - DNA, 31 bp, Artificial Sequence
  Description of Artificial Sequence:  Enzymatic Nucleic Acid
cctttttaggctagctacaacgatcaaggag

SEQ ID NO: 17703 - DNA, 31 bp, Artificial Sequence
  Description of Artificial Sequence:  Enzymatic Nucleic Acid
acataccaggctagctacaacgactttttac

SEQ ID NO: 17704 - DNA, 31 bp, Artificial Sequence
  Description of Artificial Sequence:  Enzymatic Nucleic Acid
attacataggctagctacaacgacacctttt

SEQ ID NO: 17705 - DNA, 31 bp, Artificial Sequence
  Description of Artificial Sequence:  Enzymatic Nucleic Acid
aaattacaggctagctacaacgaaccacctt

SEQ ID NO: 17706 - DNA, 31 bp, Artificial Sequence
  Description of Artificial Sequence:  Enzymatic Nucleic Acid
ataaattaggctagctacaacgaataccacc

SEQ ID NO: 17707 - DNA, 31 bp, Artificial Sequence
  Description of Artificial Sequence:  Enzymatic Nucleic Acid
tgcataaaggctagctacaacgatacatacc

SEQ ID NO: 17708 - DNA, 31 bp, Artificial Sequence
  Description of Artificial Sequence:  Enzymatic Nucleic Acid
accttgcaggctagctacaacgaaaattaca

SEQ ID NO: 17709 - DNA, 31 bp, Artificial Sequence
  Description of Artificial Sequence:  Enzymatic Nucleic Acid
ataccttgggctagctacaacgaataaatta

SEQ ID NO: 17710 - DNA, 31 bp, Artificial Sequence
  Description of Artificial Sequence:  Enzymatic Nucleic Acid
gagaaataggctagctacaacgacttgcata

SEQ ID NO: 17711 - DNA, 31 bp, Artificial Sequence
  Description of Artificial Sequence:  Enzymatic Nucleic Acid
tggagaaaggctagctacaacgaaccttgca

SEQ ID NO: 17712 - DNA, 31 bp, Artificial Sequence
  Description of Artificial Sequence:  Enzymatic Nucleic Acid
agtcccaaggctagctacaacgatggagaaa

SEQ ID NO: 17713 - DNA, 31 bp, Artificial Sequence
  Description of Artificial Sequence:  Enzymatic Nucleic Acid
atcctgagggctagctacaacgacccaactg

SEQ ID NO: 17714 - DNA, 31 bp, Artificial Sequence
  Description of Artificial Sequence:  Enzymatic Nucleic Acid
aactaataggctagctacaacgacctgagtc

SEQ ID NO: 17715 - DNA, 31 bp, Artificial Sequence
  Description of Artificial Sequence:  Enzymatic Nucleic Acid
ttaactaaggctagctacaacgaatcctgag

SEQ ID NO: 17716 - DNA, 31 bp, Artificial Sequence
  Description of Artificial Sequence:  Enzymatic Nucleic Acid
ctcattaaggctagctacaacgataatatcc

SEQ ID NO: 17717 - DNA, 31 bp, Artificial Sequence
  Description of Artificial Sequence:  Enzymatic Nucleic Acid
atggctcaggctagctacaacgataactaat

SEQ ID NO: 17718 - DNA, 31 bp, Artificial Sequence
  Description of Artificial Sequence:  Enzymatic Nucleic Acid
agtgatggggctagctacaacgatcattaac

SEQ ID NO: 17719 - DNA, 31 bp, Artificial Sequence
  Description of Artificial Sequence:  Enzymatic Nucleic Acid
tctagtgaggctagctacaacgaggctcatt

SEQ ID NO: 17720 - DNA, 31 bp, Artificial Sequence
  Description of Artificial Sequence:  Enzymatic Nucleic Acid
tcttctagggctagctacaacgagatggctc

SEQ ID NO: 17721 - DNA, 31 bp, Artificial Sequence
  Description of Artificial Sequence:  Enzymatic Nucleic Acid
aaaatgggggctagctacaacgattttcttc

SEQ ID NO: 17722 - DNA, 31 bp, Artificial Sequence
  Description of Artificial Sequence:  Enzymatic Nucleic Acid
gttgaaaaggctagctacaacgagggctttt

SEQ ID NO: 17723 - DNA, 31 bp, Artificial Sequence
  Description of Artificial Sequence:  Enzymatic Nucleic Acid
caaagcagggctagctacaacgatgaaaatg

SEQ ID NO: 17724 - DNA, 31 bp, Artificial Sequence
  Description of Artificial Sequence:  Enzymatic Nucleic Acid
tttcaaagggctagctacaacgaagttgaaa

SEQ ID NO: 17725 - DNA, 31 bp, Artificial Sequence
  Description of Artificial Sequence:  Enzymatic Nucleic Acid
caggcaagggctagctacaacgattcaaagc

SEQ ID NO: 17726 - DNA, 31 bp, Artificial Sequence
  Description of Artificial Sequence:  Enzymatic Nucleic Acid
accccaggggctagctacaacgaaagtttca

SEQ ID NO: 17727 - DNA, 31 bp, Artificial Sequence
  Description of Artificial Sequence:  Enzymatic Nucleic Acid
tgctcagaggctagctacaacgacccaggca

SEQ ID NO: 17728 - DNA, 31 bp, Artificial Sequence
  Description of Artificial Sequence:  Enzymatic Nucleic Acid
ccatcatgggctagctacaacgatcagaccc

SEQ ID NO: 17729 - DNA, 31 bp, Artificial Sequence
  Description of Artificial Sequence:  Enzymatic Nucleic Acid
tcccatcaggctagctacaacgagctcagac

SEQ ID NO: 17730 - DNA, 31 bp, Artificial Sequence
  Description of Artificial Sequence:  Enzymatic Nucleic Acid
tattcccaggctagctacaacgacatgctca

SEQ ID NO: 17731 - DNA, 31 bp, Artificial Sequence
  Description of Artificial Sequence:  Enzymatic Nucleic Acid
tctccctaggctagctacaacgatcccatca

SEQ ID NO: 17732 - DNA, 31 bp, Artificial Sequence
  Description of Artificial Sequence:  Enzymatic Nucleic Acid
ctaccctgggctagctacaacgactccctat

SEQ ID NO: 17733 - DNA, 31 bp, Artificial Sequence
  Description of Artificial Sequence:  Enzymatic Nucleic Acid
ctttcctaggctagctacaacgacctgtctc

SEQ ID NO: 17734 - DNA, 31 bp, Artificial Sequence
  Description of Artificial Sequence:  Enzymatic Nucleic Acid
agtaggcgggctagctacaacgacctttcct

SEQ ID NO: 17735 - DNA, 31 bp, Artificial Sequence
  Description of Artificial Sequence:  Enzymatic Nucleic Acid
agagtaggggctagctacaacgagccctttc

SEQ ID NO: 17736 - DNA, 31 bp, Artificial Sequence
  Description of Artificial Sequence:  Enzymatic Nucleic Acid
ctgaagagggctagctacaacgaaggcgccc

SEQ ID NO: 17737 - DNA, 31 bp, Artificial Sequence
  Description of Artificial Sequence:  Enzymatic Nucleic Acid
tctttagaggctagctacaacgacctgaaga

SEQ ID NO: 17738 - DNA, 31 bp, Artificial Sequence
  Description of Artificial Sequence:  Enzymatic Nucleic Acid
ccacttgaggctagctacaacgactttagac

SEQ ID NO: 17739 - DNA, 31 bp, Artificial Sequence
  Description of Artificial Sequence:  Enzymatic Nucleic Acid
aaggcccaggctagctacaacgattgatctt

SEQ ID NO: 17740 - DNA, 31 bp, Artificial Sequence
  Description of Artificial Sequence:  Enzymatic Nucleic Acid
atccaaggggctagctacaacgaccacttga

SEQ ID NO: 17741 - DNA, 31 bp, Artificial Sequence
  Description of Artificial Sequence:  Enzymatic Nucleic Acid
cttagcgaggctagctacaacgaccaaggcc

SEQ ID NO: 17742 - DNA, 31 bp, Artificial Sequence
  Description of Artificial Sequence:  Enzymatic Nucleic Acid
cagcttagggctagctacaacgagatccaag

SEQ ID NO: 17743 - DNA, 31 bp, Artificial Sequence
  Description of Artificial Sequence:  Enzymatic Nucleic Acid
agagccagggctagctacaacgattagcgat

SEQ ID NO: 17744 - DNA, 31 bp, Artificial Sequence
  Description of Artificial Sequence:  Enzymatic Nucleic Acid
aaacagagggctagctacaacgacagcttag

SEQ ID NO: 17745 - DNA, 31 bp, Artificial Sequence
  Description of Artificial Sequence:  Enzymatic Nucleic Acid
gcatcaaaggctagctacaacgaagagccag

SEQ ID NO: 17746 - DNA, 31 bp, Artificial Sequence
  Description of Artificial Sequence:  Enzymatic Nucleic Acid
aaatagcaggctagctacaacgacaaacaga

SEQ ID NO: 17747 - DNA, 31 bp, Artificial Sequence
  Description of Artificial Sequence:  Enzymatic Nucleic Acid
ataaatagggctagctacaacgaatcaaaca

SEQ ID NO: 17748 - DNA, 31 bp, Artificial Sequence
  Description of Artificial Sequence:  Enzymatic Nucleic Acid
tgcataaaggctagctacaacgaagcatcaa

SEQ ID NO: 17749 - DNA, 31 bp, Artificial Sequence
  Description of Artificial Sequence:  Enzymatic Nucleic Acid
aacttgcaggctagctacaacgaaaatagca

SEQ ID NO: 17750 - DNA, 31 bp, Artificial Sequence
  Description of Artificial Sequence:  Enzymatic Nucleic Acid
ctaacttgggctagctacaacgaataaatag

SEQ ID NO: 17751 - DNA, 31 bp, Artificial Sequence
  Description of Artificial Sequence:  Enzymatic Nucleic Acid
gaccctaaggctagctacaacgattgcataa

SEQ ID NO: 17752 - DNA, 31 bp, Artificial Sequence
  Description of Artificial Sequence:  Enzymatic Nucleic Acid
tacatagaggctagctacaacgacctaactt

SEQ ID NO: 17753 - DNA, 31 bp, Artificial Sequence
  Description of Artificial Sequence:  Enzymatic Nucleic Acid
taaatacaggctagctacaacgaagacccta

SEQ ID NO: 17754 - DNA, 31 bp, Artificial Sequence
  Description of Artificial Sequence:  Enzymatic Nucleic Acid
cctaaataggctagctacaacgaatagaccc

SEQ ID NO: 17755 - DNA, 31 bp, Artificial Sequence
  Description of Artificial Sequence:  Enzymatic Nucleic Acid
atcctaaaggctagctacaacgaacatagac

SEQ ID NO: 17756 - DNA, 31 bp, Artificial Sequence
  Description of Artificial Sequence:  Enzymatic Nucleic Acid
taggcgcaggctagctacaacgacctaaata

SEQ ID NO: 17757 - DNA, 31 bp, Artificial Sequence
  Description of Artificial Sequence:  Enzymatic Nucleic Acid
agtaggcgggctagctacaacgaatcctaaa

SEQ ID NO: 17758 - DNA, 31 bp, Artificial Sequence
  Description of Artificial Sequence:  Enzymatic Nucleic Acid
agagtaggggctagctacaacgagcatccta

SEQ ID NO: 17759 - DNA, 31 bp, Artificial Sequence
  Description of Artificial Sequence:  Enzymatic Nucleic Acid
ctgaagagggctagctacaacgaaggcgcat

SEQ ID NO: 17760 - DNA, 31 bp, Artificial Sequence
  Description of Artificial Sequence:  Enzymatic Nucleic Acid
tgcagacaggctagctacaacgacctaaata

SEQ ID NO: 17761 - DNA, 31 bp, Artificial Sequence
  Description of Artificial Sequence:  Enzymatic Nucleic Acid
ggtgcagaggctagctacaacgaatcctaaa

SEQ ID NO: 17762 - DNA, 31 bp, Artificial Sequence
  Description of Artificial Sequence:  Enzymatic Nucleic Acid
agaaggtgggctagctacaacgaagacatcc

SEQ ID NO: 17763 - DNA, 31 bp, Artificial Sequence
  Description of Artificial Sequence:  Enzymatic Nucleic Acid
gcagaaggggctagctacaacgagcagacat

SEQ ID NO: 17764 - DNA, 31 bp, Artificial Sequence
  Description of Artificial Sequence:  Enzymatic Nucleic Acid
actggctgggctagctacaacgaagaaggtg

SEQ ID NO: 17765 - DNA, 31 bp, Artificial Sequence
  Description of Artificial Sequence:  Enzymatic Nucleic Acid
ctgactggggctagctacaacgatgcagaag

SEQ ID NO: 17766 - DNA, 31 bp, Artificial Sequence
  Description of Artificial Sequence:  Enzymatic Nucleic Acid
gcttctgaggctagctacaacgatggctgca

SEQ ID NO: 17767 - DNA, 31 bp, Artificial Sequence
  Description of Artificial Sequence:  Enzymatic Nucleic Acid
ctctccagggctagctacaacgattctgact

SEQ ID NO: 17768 - DNA, 31 bp, Artificial Sequence
  Description of Artificial Sequence:  Enzymatic Nucleic Acid
cactgttgggctagctacaacgactctccag

SEQ ID NO: 17769 - DNA, 31 bp, Artificial Sequence
  Description of Artificial Sequence:  Enzymatic Nucleic Acid
atccactgggctagctacaacgatgcctctc

SEQ ID NO: 17770 - DNA, 31 bp, Artificial Sequence
  Description of Artificial Sequence:  Enzymatic Nucleic Acid
gcaatccaggctagctacaacgatgttgcct

SEQ ID NO: 17771 - DNA, 31 bp, Artificial Sequence
  Description of Artificial Sequence:  Enzymatic Nucleic Acid
agcagcaaggctagctacaacgaccactgtt

SEQ ID NO: 17772 - DNA, 31 bp, Artificial Sequence
  Description of Artificial Sequence:  Enzymatic Nucleic Acid
agaagcagggctagctacaacgaaatccact

SEQ ID NO: 17773 - DNA, 31 bp, Artificial Sequence
  Description of Artificial Sequence:  Enzymatic Nucleic Acid
ccaagaagggctagctacaacgaagcaatcc

SEQ ID NO: 17774 - DNA, 31 bp, Artificial Sequence
  Description of Artificial Sequence:  Enzymatic Nucleic Acid
gaagcataggctagctacaacgatcttctcc

SEQ ID NO: 17775 - DNA, 31 bp, Artificial Sequence
  Description of Artificial Sequence:  Enzymatic Nucleic Acid
aggaagcaggctagctacaacgaactcttct

SEQ ID NO: 17776 - DNA, 31 bp, Artificial Sequence
  Description of Artificial Sequence:  Enzymatic Nucleic Acid
aaaggaagggctagctacaacgaatactctt

SEQ ID NO: 17777 - DNA, 31 bp, Artificial Sequence
  Description of Artificial Sequence:  Enzymatic Nucleic Acid
tacatggaggctagctacaacgaaaaaggaa

SEQ ID NO: 17778 - DNA, 31 bp, Artificial Sequence
  Description of Artificial Sequence:  Enzymatic Nucleic Acid
aaattacaggctagctacaacgaggataaaa

SEQ ID NO: 17779 - DNA, 31 bp, Artificial Sequence
  Description of Artificial Sequence:  Enzymatic Nucleic Acid
ttaaattaggctagctacaacgaatggataa

SEQ ID NO: 17780 - DNA, 31 bp, Artificial Sequence
  Description of Artificial Sequence:  Enzymatic Nucleic Acid
cagttaaaggctagctacaacgatacatgga

SEQ ID NO: 17781 - DNA, 31 bp, Artificial Sequence
  Description of Artificial Sequence:  Enzymatic Nucleic Acid
ttctacagggctagctacaacgataaattac

SEQ ID NO: 17782 - DNA, 31 bp, Artificial Sequence
  Description of Artificial Sequence:  Enzymatic Nucleic Acid
aggttctaggctagctacaacgaagttaaat

SEQ ID NO: 17783 - DNA, 31 bp, Artificial Sequence
  Description of Artificial Sequence:  Enzymatic Nucleic Acid
agctcaggggctagctacaacgatctacagt

SEQ ID NO: 17784 - DNA, 31 bp, Artificial Sequence
  Description of Artificial Sequence:  Enzymatic Nucleic Acid
acttagagggctagctacaacgatcaggttc

SEQ ID NO: 17785 - DNA, 31 bp, Artificial Sequence
  Description of Artificial Sequence:  Enzymatic Nucleic Acid
ttcggttaggctagctacaacgattagagct

SEQ ID NO: 17786 - DNA, 31 bp, Artificial Sequence
  Description of Artificial Sequence:  Enzymatic Nucleic Acid
ttcttcggggctagctacaacgatacttaga

SEQ ID NO: 17787 - DNA, 31 bp, Artificial Sequence
  Description of Artificial Sequence:  Enzymatic Nucleic Acid
ggcatacaggctagctacaacgatcttcggt

SEQ ID NO: 17788 - DNA, 31 bp, Artificial Sequence
  Description of Artificial Sequence:  Enzymatic Nucleic Acid
gaggcataggctagctacaacgaattcttcg

SEQ ID NO: 17789 - DNA, 31 bp, Artificial Sequence
  Description of Artificial Sequence:  Enzymatic Nucleic Acid
cagaggcaggctagctacaacgaacattctt

SEQ ID NO: 17790 - DNA, 31 bp, Artificial Sequence
  Description of Artificial Sequence:  Enzymatic Nucleic Acid
aacagaggggctagctacaacgaatacattc

SEQ ID NO: 17791 - DNA, 31 bp, Artificial Sequence
  Description of Artificial Sequence:  Enzymatic Nucleic Acid
cataagaaggctagctacaacgaagaggcat

SEQ ID NO: 17792 - DNA, 31 bp, Artificial Sequence
  Description of Artificial Sequence:  Enzymatic Nucleic Acid
gtggcacaggctagctacaacgaaagaacag

SEQ ID NO: 17793 - DNA, 31 bp, Artificial Sequence
  Description of Artificial Sequence:  Enzymatic Nucleic Acid
atgtggcaggctagctacaacgaataagaac

SEQ ID NO: 17794 - DNA, 31 bp, Artificial Sequence
  Description of Artificial Sequence:  Enzymatic Nucleic Acid
ggatgtggggctagctacaacgaacataaga

SEQ ID NO: 17795 - DNA, 31 bp, Artificial Sequence
  Description of Artificial Sequence:  Enzymatic Nucleic Acid
caaggatgggctagctacaacgaggcacata

SEQ ID NO: 17796 - DNA, 31 bp, Artificial Sequence
  Description of Artificial Sequence:  Enzymatic Nucleic Acid
aacaaggaggctagctacaacgagtggcaca

SEQ ID NO: 17797 - DNA, 31 bp, Artificial Sequence
  Description of Artificial Sequence:  Enzymatic Nucleic Acid
cctttaaaggctagctacaacgaaaggatgt

SEQ ID NO: 17798 - DNA, 31 bp, Artificial Sequence
  Description of Artificial Sequence:  Enzymatic Nucleic Acid
acagagagggctagctacaacgactttaaac

SEQ ID NO: 17799 - DNA, 31 bp, Artificial Sequence
  Description of Artificial Sequence:  Enzymatic Nucleic Acid
tcttcataggctagctacaacgaagagagcc

SEQ ID NO: 17800 - DNA, 31 bp, Artificial Sequence
  Description of Artificial Sequence:  Enzymatic Nucleic Acid
tctcttcaggctagctacaacgaacagagag

SEQ ID NO: 17801 - DNA, 31 bp, Artificial Sequence
  Description of Artificial Sequence:  Enzymatic Nucleic Acid
cggtcccaggctagctacaacgactcttcat

SEQ ID NO: 17802 - DNA, 31 bp, Artificial Sequence
  Description of Artificial Sequence:  Enzymatic Nucleic Acid
gatgacggggctagctacaacgacccatctc

SEQ ID NO: 17803 - DNA, 31 bp, Artificial Sequence
  Description of Artificial Sequence:  Enzymatic Nucleic Acid
gctgatgaggctagctacaacgaggtcccat

SEQ ID NO: 17804 - DNA, 31 bp, Artificial Sequence
  Description of Artificial Sequence:  Enzymatic Nucleic Acid
tgtgctgaggctagctacaacgagacggtcc

SEQ ID NO: 17805 - DNA, 31 bp, Artificial Sequence
  Description of Artificial Sequence:  Enzymatic Nucleic Acid
ggaatgtgggctagctacaacgatgatgacg

SEQ ID NO: 17806 - DNA, 31 bp, Artificial Sequence
  Description of Artificial Sequence:  Enzymatic Nucleic Acid
agggaatgggctagctacaacgagctgatga

SEQ ID NO: 17807 - DNA, 31 bp, Artificial Sequence
  Description of Artificial Sequence:  Enzymatic Nucleic Acid
ctagggaaggctagctacaacgagtgctgat

SEQ ID NO: 17808 - DNA, 31 bp, Artificial Sequence
  Description of Artificial Sequence:  Enzymatic Nucleic Acid
taggctcaggctagctacaacgatagggaat

SEQ ID NO: 17809 - DNA, 31 bp, Artificial Sequence
  Description of Artificial Sequence:  Enzymatic Nucleic Acid
ccagtaggggctagctacaacgatcactagg

SEQ ID NO: 17810 - DNA, 31 bp, Artificial Sequence
  Description of Artificial Sequence:  Enzymatic Nucleic Acid
ggagccagggctagctacaacgaaggctcac

SEQ ID NO: 17811 - DNA, 31 bp, Artificial Sequence
  Description of Artificial Sequence:  Enzymatic Nucleic Acid
gccaggagggctagctacaacgacagtaggc

SEQ ID NO: 17812 - DNA, 31 bp, Artificial Sequence
  Description of Artificial Sequence:  Enzymatic Nucleic Acid
agccgctgggctagctacaacgacaggagcc

SEQ ID NO: 17813 - DNA, 31 bp, Artificial Sequence
  Description of Artificial Sequence:  Enzymatic Nucleic Acid
aaaagccgggctagctacaacgatgccagga

SEQ ID NO: 17814 - DNA, 31 bp, Artificial Sequence
  Description of Artificial Sequence:  Enzymatic Nucleic Acid
cacaaaagggctagctacaacgacgctgcca

SEQ ID NO: 17815 - DNA, 31 bp, Artificial Sequence
  Description of Artificial Sequence:  Enzymatic Nucleic Acid
gtcttccaggctagctacaacgaaaaagccg

SEQ ID NO: 17816 - DNA, 31 bp, Artificial Sequence
  Description of Artificial Sequence:  Enzymatic Nucleic Acid
ctagtgagggctagctacaacgacttccaca

SEQ ID NO: 17817 - DNA, 31 bp, Artificial Sequence
  Description of Artificial Sequence:  Enzymatic Nucleic Acid
ctggctagggctagctacaacgagagtcttc

SEQ ID NO: 17818 - DNA, 31 bp, Artificial Sequence
  Description of Artificial Sequence:  Enzymatic Nucleic Acid
tcttctggggctagctacaacgatagtgagt

SEQ ID NO: 17819 - DNA, 31 bp, Artificial Sequence
  Description of Artificial Sequence:  Enzymatic Nucleic Acid
ctgtcccaggctagctacaacgatcctctct

SEQ ID NO: 17820 - DNA, 31 bp, Artificial Sequence
  Description of Artificial Sequence:  Enzymatic Nucleic Acid
gaggactgggctagctacaacgacccactcc

SEQ ID NO: 17821 - DNA, 31 bp, Artificial Sequence
  Description of Artificial Sequence:  Enzymatic Nucleic Acid
ggagaggaggctagctacaacgatgtcccac

SEQ ID NO: 17822 - DNA, 31 bp, Artificial Sequence
  Description of Artificial Sequence:  Enzymatic Nucleic Acid
gatcttggggctagctacaacgaggagagga

SEQ ID NO: 17823 - DNA, 31 bp, Artificial Sequence
  Description of Artificial Sequence:  Enzymatic Nucleic Acid
gatttagaggctagctacaacgacttggtgg

SEQ ID NO: 17824 - DNA, 31 bp, Artificial Sequence
  Description of Artificial Sequence:  Enzymatic Nucleic Acid
tgtttggaggctagctacaacgattagatct

SEQ ID NO: 17825 - DNA, 31 bp, Artificial Sequence
  Description of Artificial Sequence:  Enzymatic Nucleic Acid
tgcttttgggctagctacaacgattggattt

SEQ ID NO: 17826 - DNA, 31 bp, Artificial Sequence
  Description of Artificial Sequence:  Enzymatic Nucleic Acid
ctagcctgggctagctacaacgattttgttt

SEQ ID NO: 17827 - DNA, 31 bp, Artificial Sequence
  Description of Artificial Sequence:  Enzymatic Nucleic Acid
ggctctagggctagctacaacgactgctttt

SEQ ID NO: 17828 - DNA, 31 bp, Artificial Sequence
  Description of Artificial Sequence:  Enzymatic Nucleic Acid
tcttctggggctagctacaacgatctagcct

SEQ ID NO: 17829 - DNA, 31 bp, Artificial Sequence
  Description of Artificial Sequence:  Enzymatic Nucleic Acid
aagatttgggctagctacaacgacctctctt

SEQ ID NO: 17830 - DNA, 31 bp, Artificial Sequence
  Description of Artificial Sequence:  Enzymatic Nucleic Acid
aacaaagaggctagctacaacgattgtcctc

SEQ ID NO: 17831 - DNA, 31 bp, Artificial Sequence
  Description of Artificial Sequence:  Enzymatic Nucleic Acid
aggaacaaggctagctacaacgaaaagattt

SEQ ID NO: 17832 - DNA, 31 bp, Artificial Sequence
  Description of Artificial Sequence:  Enzymatic Nucleic Acid
aagaggaaggctagctacaacgaaacaaaga

SEQ ID NO: 17833 - DNA, 31 bp, Artificial Sequence
  Description of Artificial Sequence:  Enzymatic Nucleic Acid
cgtatgtgggctagctacaacgaaaagaaga

SEQ ID NO: 17834 - DNA, 31 bp, Artificial Sequence
  Description of Artificial Sequence:  Enzymatic Nucleic Acid
tgcgtatgggctagctacaacgagtaaagaa

SEQ ID NO: 17835 - DNA, 31 bp, Artificial Sequence
  Description of Artificial Sequence:  Enzymatic Nucleic Acid
tttgcgtaggctagctacaacgagtgtaaag

SEQ ID NO: 17836 - DNA, 31 bp, Artificial Sequence
  Description of Artificial Sequence:  Enzymatic Nucleic Acid
ggtttgcgggctagctacaacgaatgtgtaa

SEQ ID NO: 17837 - DNA, 31 bp, Artificial Sequence
  Description of Artificial Sequence:  Enzymatic Nucleic Acid
gtggtttgggctagctacaacgagtatgtgt

SEQ ID NO: 17838 - DNA, 31 bp, Artificial Sequence
  Description of Artificial Sequence:  Enzymatic Nucleic Acid
acaggtggggctagctacaacgattgcgtat

SEQ ID NO: 17839 - DNA, 31 bp, Artificial Sequence
  Description of Artificial Sequence:  Enzymatic Nucleic Acid
gtcacaggggctagctacaacgaggtttgcg

SEQ ID NO: 17840 - DNA, 31 bp, Artificial Sequence
  Description of Artificial Sequence:  Enzymatic Nucleic Acid
agctgtcaggctagctacaacgaaggtggtt

SEQ ID NO: 17841 - DNA, 31 bp, Artificial Sequence
  Description of Artificial Sequence:  Enzymatic Nucleic Acid
gccagctgggctagctacaacgacacaggtg

SEQ ID NO: 17842 - DNA, 31 bp, Artificial Sequence
  Description of Artificial Sequence:  Enzymatic Nucleic Acid
attgccagggctagctacaacgatgtcacag

SEQ ID NO: 17843 - DNA, 31 bp, Artificial Sequence
  Description of Artificial Sequence:  Enzymatic Nucleic Acid
taaaattgggctagctacaacgacagctgtc

SEQ ID NO: 17844 - DNA, 31 bp, Artificial Sequence
  Description of Artificial Sequence:  Enzymatic Nucleic Acid
ttataaaaggctagctacaacgatgccagct

SEQ ID NO: 17845 - DNA, 31 bp, Artificial Sequence
  Description of Artificial Sequence:  Enzymatic Nucleic Acid
ctgatttaggctagctacaacgaaaaattgc

SEQ ID NO: 17846 - DNA, 31 bp, Artificial Sequence
  Description of Artificial Sequence:  Enzymatic Nucleic Acid
ttacctgaggctagctacaacgattataaaa

SEQ ID NO: 17847 - DNA, 31 bp, Artificial Sequence
  Description of Artificial Sequence:  Enzymatic Nucleic Acid
tccagttaggctagctacaacgactgattta

SEQ ID NO: 17848 - DNA, 31 bp, Artificial Sequence
  Description of Artificial Sequence:  Enzymatic Nucleic Acid
ccttccagggctagctacaacgatacctgat

SEQ ID NO: 17849 - DNA, 31 bp, Artificial Sequence
  Description of Artificial Sequence:  Enzymatic Nucleic Acid
gagtttaaggctagctacaacgactccttcc

SEQ ID NO: 17850 - DNA, 31 bp, Artificial Sequence
  Description of Artificial Sequence:  Enzymatic Nucleic Acid
tttctgagggctagctacaacgattaacctc

SEQ ID NO: 17851 - DNA, 31 bp, Artificial Sequence
  Description of Artificial Sequence:  Enzymatic Nucleic Acid
gactgaggggctagctacaacgacttctttt

SEQ ID NO: 17852 - DNA, 31 bp, Artificial Sequence
  Description of Artificial Sequence:  Enzymatic Nucleic Acid
agaattgaggctagctacaacgatgaggtct

SEQ ID NO: 17853 - DNA, 31 bp, Artificial Sequence
  Description of Artificial Sequence:  Enzymatic Nucleic Acid
gtagagaaggctagctacaacgatgactgag

SEQ ID NO: 17854 - DNA, 31 bp, Artificial Sequence
  Description of Artificial Sequence:  Enzymatic Nucleic Acid
aaaaaaagggctagctacaacgaagagaatt

SEQ ID NO: 17855 - DNA, 31 bp, Artificial Sequence
  Description of Artificial Sequence:  Enzymatic Nucleic Acid
ttatctgaggctagctacaacgattggaaaa

SEQ ID NO: 17856 - DNA, 31 bp, Artificial Sequence
  Description of Artificial Sequence:  Enzymatic Nucleic Acid
ggctattaggctagctacaacgactgatttg

SEQ ID NO: 17857 - DNA, 31 bp, Artificial Sequence
  Description of Artificial Sequence:  Enzymatic Nucleic Acid
ctgggctaggctagctacaacgatatctgat

SEQ ID NO: 17858 - DNA, 31 bp, Artificial Sequence
  Description of Artificial Sequence:  Enzymatic Nucleic Acid
ttgctgggggctagctacaacgatattatct

SEQ ID NO: 17859 - DNA, 31 bp, Artificial Sequence
  Description of Artificial Sequence:  Enzymatic Nucleic Acid
actatttgggctagctacaacgatgggctat

SEQ ID NO: 17860 - DNA, 31 bp, Artificial Sequence
  Description of Artificial Sequence:  Enzymatic Nucleic Acid
tatcactaggctagctacaacgattgctggg

SEQ ID NO: 17861 - DNA, 31 bp, Artificial Sequence
  Description of Artificial Sequence:  Enzymatic Nucleic Acid
tgttatcaggctagctacaacgatatttgct

SEQ ID NO: 17862 - DNA, 31 bp, Artificial Sequence
  Description of Artificial Sequence:  Enzymatic Nucleic Acid
atttgttaggctagctacaacgacactattt

SEQ ID NO: 17863 - DNA, 31 bp, Artificial Sequence
  Description of Artificial Sequence:  Enzymatic Nucleic Acid
tttatttgggctagctacaacgatatcacta

SEQ ID NO: 17864 - DNA, 31 bp, Artificial Sequence
  Description of Artificial Sequence:  Enzymatic Nucleic Acid
aggttttaggctagctacaacgattgttatc

SEQ ID NO: 17865 - DNA, 31 bp, Artificial Sequence
  Description of Artificial Sequence:  Enzymatic Nucleic Acid
agctaaggggctagctacaacgatttatttg

SEQ ID NO: 17866 - DNA, 31 bp, Artificial Sequence
  Description of Artificial Sequence:  Enzymatic Nucleic Acid
atgaacagggctagctacaacgataaggttt

SEQ ID NO: 17867 - DNA, 31 bp, Artificial Sequence
  Description of Artificial Sequence:  Enzymatic Nucleic Acid
gacatgaaggctagctacaacgaagctaagg

SEQ ID NO: 17868 - DNA, 31 bp, Artificial Sequence
  Description of Artificial Sequence:  Enzymatic Nucleic Acid
tcaagacaggctagctacaacgagaacagct

SEQ ID NO: 17869 - DNA, 31 bp, Artificial Sequence
  Description of Artificial Sequence:  Enzymatic Nucleic Acid
aatcaagaggctagctacaacgaatgaacag

SEQ ID NO: 17870 - DNA, 31 bp, Artificial Sequence
  Description of Artificial Sequence:  Enzymatic Nucleic Acid
tattgaaaggctagctacaacgacaagacat

SEQ ID NO: 17871 - DNA, 31 bp, Artificial Sequence
  Description of Artificial Sequence:  Enzymatic Nucleic Acid
attaattaggctagctacaacgatgaaatca

SEQ ID NO: 17872 - DNA, 31 bp, Artificial Sequence
  Description of Artificial Sequence:  Enzymatic Nucleic Acid
agaattaaggctagctacaacgatattgaaa

SEQ ID NO: 17873 - DNA, 31 bp, Artificial Sequence
  Description of Artificial Sequence:  Enzymatic Nucleic Acid
attaagaaggctagctacaacgataattatt

SEQ ID NO: 17874 - DNA, 31 bp, Artificial Sequence
  Description of Artificial Sequence:  Enzymatic Nucleic Acid
cttaatgaggctagctacaacgataagaatt

SEQ ID NO: 17875 - DNA, 31 bp, Artificial Sequence
  Description of Artificial Sequence:  Enzymatic Nucleic Acid
tctcttaaggctagctacaacgagattaaga

SEQ ID NO: 17876 - DNA, 31 bp, Artificial Sequence
  Description of Artificial Sequence:  Enzymatic Nucleic Acid
tattatggggctagctacaacgactcttaat

SEQ ID NO: 17877 - DNA, 31 bp, Artificial Sequence
  Description of Artificial Sequence:  Enzymatic Nucleic Acid
atttattaggctagctacaacgaggtctctt

SEQ ID NO: 17878 - DNA, 31 bp, Artificial Sequence
  Description of Artificial Sequence:  Enzymatic Nucleic Acid
agtatttaggctagctacaacgatatggtct

SEQ ID NO: 17879 - DNA, 31 bp, Artificial Sequence
  Description of Artificial Sequence:  Enzymatic Nucleic Acid
aaggagtaggctagctacaacgattattatg

SEQ ID NO: 17880 - DNA, 31 bp, Artificial Sequence
  Description of Artificial Sequence:  Enzymatic Nucleic Acid
aaaaggagggctagctacaacgaatttatta

SEQ ID NO: 17881 - DNA, 31 bp, Artificial Sequence
  Description of Artificial Sequence:  Enzymatic Nucleic Acid
tggttttgggctagctacaacgattttctct

SEQ ID NO: 17882 - DNA, 31 bp, Artificial Sequence
  Description of Artificial Sequence:  Enzymatic Nucleic Acid
tctaatggggctagctacaacgatttgcttt

SEQ ID NO: 17883 - DNA, 31 bp, Artificial Sequence
  Description of Artificial Sequence:  Enzymatic Nucleic Acid
aattctaaggctagctacaacgaggttttgc

SEQ ID NO: 17884 - DNA, 31 bp, Artificial Sequence
  Description of Artificial Sequence:  Enzymatic Nucleic Acid
agtaacaaggctagctacaacgatctaatgg

SEQ ID NO: 17885 - DNA, 31 bp, Artificial Sequence
  Description of Artificial Sequence:  Enzymatic Nucleic Acid
ctgagtaaggctagctacaacgaaattctaa

SEQ ID NO: 17886 - DNA, 31 bp, Artificial Sequence
  Description of Artificial Sequence:  Enzymatic Nucleic Acid
gagctgagggctagctacaacgaaacaattc

SEQ ID NO: 17887 - DNA, 31 bp, Artificial Sequence
  Description of Artificial Sequence:  Enzymatic Nucleic Acid
tgaaggagggctagctacaacgatgagtaac

SEQ ID NO: 17888 - DNA, 31 bp, Artificial Sequence
  Description of Artificial Sequence:  Enzymatic Nucleic Acid
aacctgagggctagctacaacgattgaagga

SEQ ID NO: 17889 - DNA, 31 bp, Artificial Sequence
  Description of Artificial Sequence:  Enzymatic Nucleic Acid
gctacaaaggctagctacaacgactgagttt

SEQ ID NO: 17890 - DNA, 31 bp, Artificial Sequence
  Description of Artificial Sequence:  Enzymatic Nucleic Acid
gtatgctaggctagctacaacgaaaacctga

SEQ ID NO: 17891 - DNA, 31 bp, Artificial Sequence
  Description of Artificial Sequence:  Enzymatic Nucleic Acid
catgtatgggctagctacaacgatacaaacc

SEQ ID NO: 17892 - DNA, 31 bp, Artificial Sequence
  Description of Artificial Sequence:  Enzymatic Nucleic Acid
ctcatgtaggctagctacaacgagctacaaa

SEQ ID NO: 17893 - DNA, 31 bp, Artificial Sequence
  Description of Artificial Sequence:  Enzymatic Nucleic Acid
gactcatgggctagctacaacgaatgctaca

SEQ ID NO: 17894 - DNA, 31 bp, Artificial Sequence
  Description of Artificial Sequence:  Enzymatic Nucleic Acid
tggactcaggctagctacaacgagtatgcta

SEQ ID NO: 17895 - DNA, 31 bp, Artificial Sequence
  Description of Artificial Sequence:  Enzymatic Nucleic Acid
tggatggaggctagctacaacgatcatgtat

SEQ ID NO: 17896 - DNA, 31 bp, Artificial Sequence
  Description of Artificial Sequence:  Enzymatic Nucleic Acid
ctgatggaggctagctacaacgaggactcat

SEQ ID NO: 17897 - DNA, 31 bp, Artificial Sequence
  Description of Artificial Sequence:  Enzymatic Nucleic Acid
ttgactgaggctagctacaacgaggatggac

SEQ ID NO: 17898 - DNA, 31 bp, Artificial Sequence
  Description of Artificial Sequence:  Enzymatic Nucleic Acid
ttctttgaggctagctacaacgatgatggat

SEQ ID NO: 17899 - DNA, 31 bp, Artificial Sequence
  Description of Artificial Sequence:  Enzymatic Nucleic Acid
tggaaccaggctagctacaacgatctttgac

SEQ ID NO: 17900 - DNA, 31 bp, Artificial Sequence
  Description of Artificial Sequence:  Enzymatic Nucleic Acid
agatggaaggctagctacaacgacattcttt

SEQ ID NO: 17901 - DNA, 31 bp, Artificial Sequence
  Description of Artificial Sequence:  Enzymatic Nucleic Acid
actccagaggctagctacaacgaggaaccat

SEQ ID NO: 17902 - DNA, 31 bp, Artificial Sequence
  Description of Artificial Sequence:  Enzymatic Nucleic Acid
cattaagaggctagctacaacgatccagatg

SEQ ID NO: 17903 - DNA, 31 bp, Artificial Sequence
  Description of Artificial Sequence:  Enzymatic Nucleic Acid
tttctacaggctagctacaacgataagactc

SEQ ID NO: 17904 - DNA, 31 bp, Artificial Sequence
  Description of Artificial Sequence:  Enzymatic Nucleic Acid
tctttctaggctagctacaacgaattaagac

SEQ ID NO: 17905 - DNA, 31 bp, Artificial Sequence
  Description of Artificial Sequence:  Enzymatic Nucleic Acid
agtctccaggctagctacaacgattttcttt

SEQ ID NO: 17906 - DNA, 31 bp, Artificial Sequence
  Description of Artificial Sequence:  Enzymatic Nucleic Acid
attacaagggctagctacaacgactccattt

SEQ ID NO: 17907 - DNA, 31 bp, Artificial Sequence
  Description of Artificial Sequence:  Enzymatic Nucleic Acid
cattattaggctagctacaacgaaagtctcc

SEQ ID NO: 17908 - DNA, 31 bp, Artificial Sequence
  Description of Artificial Sequence:  Enzymatic Nucleic Acid
gctcattaggctagctacaacgatacaagtc

SEQ ID NO: 17909 - DNA, 31 bp, Artificial Sequence
  Description of Artificial Sequence:  Enzymatic Nucleic Acid
ctagctcaggctagctacaacgatattacaa

SEQ ID NO: 17910 - DNA, 31 bp, Artificial Sequence
  Description of Artificial Sequence:  Enzymatic Nucleic Acid
gtaactagggctagctacaacgatcattatt

SEQ ID NO: 17911 - DNA, 31 bp, Artificial Sequence
  Description of Artificial Sequence:  Enzymatic Nucleic Acid
ctttgtaaggctagctacaacgatagctcat

SEQ ID NO: 17912 - DNA, 31 bp, Artificial Sequence
  Description of Artificial Sequence:  Enzymatic Nucleic Acid
gcactttgggctagctacaacgaaactagct

SEQ ID NO: 17913 - DNA, 31 bp, Artificial Sequence
  Description of Artificial Sequence:  Enzymatic Nucleic Acid
aacaagcaggctagctacaacgatttgtaac

SEQ ID NO: 17914 - DNA, 31 bp, Artificial Sequence
  Description of Artificial Sequence:  Enzymatic Nucleic Acid
tgaacaagggctagctacaacgaactttgta

SEQ ID NO: 17915 - DNA, 31 bp, Artificial Sequence
  Description of Artificial Sequence:  Enzymatic Nucleic Acid
ttaatgaaggctagctacaacgaaagcactt

SEQ ID NO: 17916 - DNA, 31 bp, Artificial Sequence
  Description of Artificial Sequence:  Enzymatic Nucleic Acid
tattttaaggctagctacaacgagaacaagc

SEQ ID NO: 17917 - DNA, 31 bp, Artificial Sequence
  Description of Artificial Sequence:  Enzymatic Nucleic Acid
cagtgctaggctagctacaacgatttaatga

SEQ ID NO: 17918 - DNA, 31 bp, Artificial Sequence
  Description of Artificial Sequence:  Enzymatic Nucleic Acid
tttcagtgggctagctacaacgatattttaa

SEQ ID NO: 17919 - DNA, 31 bp, Artificial Sequence
  Description of Artificial Sequence:  Enzymatic Nucleic Acid
attttcagggctagctacaacgagctatttt

SEQ ID NO: 17920 - DNA, 31 bp, Artificial Sequence
  Description of Artificial Sequence:  Enzymatic Nucleic Acid
tgtttcaaggctagctacaacgatttcagtg

SEQ ID NO: 17921 - DNA, 31 bp, Artificial Sequence
  Description of Artificial Sequence:  Enzymatic Nucleic Acid
aattcatgggctagctacaacgattcaattt

SEQ ID NO: 17922 - DNA, 31 bp, Artificial Sequence
  Description of Artificial Sequence:  Enzymatic Nucleic Acid
ttaattcaggctagctacaacgagtttcaat

SEQ ID NO: 17923 - DNA, 31 bp, Artificial Sequence
  Description of Artificial Sequence:  Enzymatic Nucleic Acid
tcagttaaggctagctacaacgatcatgttt

SEQ ID NO: 17924 - DNA, 31 bp, Artificial Sequence
  Description of Artificial Sequence:  Enzymatic Nucleic Acid
attatcagggctagctacaacgataattcat

SEQ ID NO: 17925 - DNA, 31 bp, Artificial Sequence
  Description of Artificial Sequence:  Enzymatic Nucleic Acid
gaatattaggctagctacaacgacagttaat

SEQ ID NO: 17926 - DNA, 31 bp, Artificial Sequence
  Description of Artificial Sequence:  Enzymatic Nucleic Acid
ttggaataggctagctacaacgatatcagtt

SEQ ID NO: 17927 - DNA, 31 bp, Artificial Sequence
  Description of Artificial Sequence:  Enzymatic Nucleic Acid
gattggaaggctagctacaacgaattatcag

SEQ ID NO: 17928 - DNA, 31 bp, Artificial Sequence
  Description of Artificial Sequence:  Enzymatic Nucleic Acid
gcaaatgaggctagctacaacgatggaatat

SEQ ID NO: 17929 - DNA, 31 bp, Artificial Sequence
  Description of Artificial Sequence:  Enzymatic Nucleic Acid
atggcaaaggctagctacaacgagattggaa

SEQ ID NO: 17930 - DNA, 31 bp, Artificial Sequence
  Description of Artificial Sequence:  Enzymatic Nucleic Acid
ataaatggggctagctacaacgaaaatgatt

SEQ ID NO: 17931 - DNA, 31 bp, Artificial Sequence
  Description of Artificial Sequence:  Enzymatic Nucleic Acid
gtcataaaggctagctacaacgaggcaaatg

SEQ ID NO: 17932 - DNA, 31 bp, Artificial Sequence
  Description of Artificial Sequence:  Enzymatic Nucleic Acid
ttttgtcaggctagctacaacgaaaatggca

SEQ ID NO: 17933 - DNA, 31 bp, Artificial Sequence
  Description of Artificial Sequence:  Enzymatic Nucleic Acid
catttttgggctagctacaacgacataaatg

SEQ ID NO: 17934 - DNA, 31 bp, Artificial Sequence
  Description of Artificial Sequence:  Enzymatic Nucleic Acid
gccaaccaggctagctacaacgattttgtca

SEQ ID NO: 17935 - DNA, 31 bp, Artificial Sequence
  Description of Artificial Sequence:  Enzymatic Nucleic Acid
agtgccaaggctagctacaacgacatttttg

SEQ ID NO: 17936 - DNA, 31 bp, Artificial Sequence
  Description of Artificial Sequence:  Enzymatic Nucleic Acid
tgttagtgggctagctacaacgacaaccatt

SEQ ID NO: 17937 - DNA, 31 bp, Artificial Sequence
  Description of Artificial Sequence:  Enzymatic Nucleic Acid
tttgttagggctagctacaacgagccaacca

SEQ ID NO: 17938 - DNA, 31 bp, Artificial Sequence
  Description of Artificial Sequence:  Enzymatic Nucleic Acid
gttctttgggctagctacaacgatagtgcca

SEQ ID NO: 17939 - DNA, 31 bp, Artificial Sequence
  Description of Artificial Sequence:  Enzymatic Nucleic Acid
agtgctcgggctagctacaacgatctttgtt

SEQ ID NO: 17940 - DNA, 31 bp, Artificial Sequence
  Description of Artificial Sequence:  Enzymatic Nucleic Acid
aggaagtgggctagctacaacgatcgttctt

SEQ ID NO: 17941 - DNA, 31 bp, Artificial Sequence
  Description of Artificial Sequence:  Enzymatic Nucleic Acid
aaaggaagggctagctacaacgagctcgttc

SEQ ID NO: 17942 - DNA, 31 bp, Artificial Sequence
  Description of Artificial Sequence:  Enzymatic Nucleic Acid
ctcagaaaggctagctacaacgatctgaaag

SEQ ID NO: 17943 - DNA, 31 bp, Artificial Sequence
  Description of Artificial Sequence:  Enzymatic Nucleic Acid
gtacattaggctagctacaacgactcagaaa

SEQ ID NO: 17944 - DNA, 31 bp, Artificial Sequence
  Description of Artificial Sequence:  Enzymatic Nucleic Acid
cacgtacaggctagctacaacgatatctcag

SEQ ID NO: 17945 - DNA, 31 bp, Artificial Sequence
  Description of Artificial Sequence:  Enzymatic Nucleic Acid
tccacgtaggctagctacaacgaattatctc

SEQ ID NO: 17946 - DNA, 31 bp, Artificial Sequence
  Description of Artificial Sequence:  Enzymatic Nucleic Acid
gttccacgggctagctacaacgaacattatc

SEQ ID NO: 17947 - DNA, 31 bp, Artificial Sequence
  Description of Artificial Sequence:  Enzymatic Nucleic Acid
ctgttccaggctagctacaacgagtacatta

SEQ ID NO: 17948 - DNA, 31 bp, Artificial Sequence
  Description of Artificial Sequence:  Enzymatic Nucleic Acid
ccagactgggctagctacaacgatccacgta

SEQ ID NO: 17949 - DNA, 31 bp, Artificial Sequence
  Description of Artificial Sequence:  Enzymatic Nucleic Acid
cacccagaggctagctacaacgatgttccac

SEQ ID NO: 17950 - DNA, 31 bp, Artificial Sequence
  Description of Artificial Sequence:  Enzymatic Nucleic Acid
ccattccaggctagctacaacgaccagactg

SEQ ID NO: 17951 - DNA, 31 bp, Artificial Sequence
  Description of Artificial Sequence:  Enzymatic Nucleic Acid
cagccccaggctagctacaacgatccaccca

SEQ ID NO: 17952 - DNA, 31 bp, Artificial Sequence
  Description of Artificial Sequence:  Enzymatic Nucleic Acid
ggtttcagggctagctacaacgacccattcc

SEQ ID NO: 17953 - DNA, 31 bp, Artificial Sequence
  Description of Artificial Sequence:  Enzymatic Nucleic Acid
gcacatggggctagctacaacgattcagccc

SEQ ID NO: 17954 - DNA, 31 bp, Artificial Sequence
  Description of Artificial Sequence:  Enzymatic Nucleic Acid
cttgcacaggctagctacaacgaggtttcag

SEQ ID NO: 17955 - DNA, 31 bp, Artificial Sequence
  Description of Artificial Sequence:  Enzymatic Nucleic Acid
gacttgcaggctagctacaacgaatggtttc

SEQ ID NO: 17956 - DNA, 31 bp, Artificial Sequence
  Description of Artificial Sequence:  Enzymatic Nucleic Acid
cagacttgggctagctacaacgaacatggtt

SEQ ID NO: 17957 - DNA, 31 bp, Artificial Sequence
  Description of Artificial Sequence:  Enzymatic Nucleic Acid
gacacagaggctagctacaacgattgcacat

SEQ ID NO: 17958 - DNA, 31 bp, Artificial Sequence
  Description of Artificial Sequence:  Enzymatic Nucleic Acid
acaagacaggctagctacaacgaagacttgc

SEQ ID NO: 17959 - DNA, 31 bp, Artificial Sequence
  Description of Artificial Sequence:  Enzymatic Nucleic Acid
tgacaagaggctagctacaacgaacagactt

SEQ ID NO: 17960 - DNA, 31 bp, Artificial Sequence
  Description of Artificial Sequence:  Enzymatic Nucleic Acid
tggactgaggctagctacaacgaaagacaca

SEQ ID NO: 17961 - DNA, 31 bp, Artificial Sequence
  Description of Artificial Sequence:  Enzymatic Nucleic Acid
ttcttggaggctagctacaacgatgacaaga

SEQ ID NO: 17962 - DNA, 31 bp, Artificial Sequence
  Description of Artificial Sequence:  Enzymatic Nucleic Acid
cggtgtcaggctagctacaacgattcttgga

SEQ ID NO: 17963 - DNA, 31 bp, Artificial Sequence
  Description of Artificial Sequence:  Enzymatic Nucleic Acid
tctcggtgggctagctacaacgacacttctt

SEQ ID NO: 17964 - DNA, 31 bp, Artificial Sequence
  Description of Artificial Sequence:  Enzymatic Nucleic Acid
catctcggggctagctacaacgagtcacttc

SEQ ID NO: 17965 - DNA, 31 bp, Artificial Sequence
  Description of Artificial Sequence:  Enzymatic Nucleic Acid
aattaacaggctagctacaacgactcggtgt

SEQ ID NO: 17966 - DNA, 31 bp, Artificial Sequence
  Description of Artificial Sequence:  Enzymatic Nucleic Acid
aaaattaaggctagctacaacgaatctcggt

SEQ ID NO: 17967 - DNA, 31 bp, Artificial Sequence
  Description of Artificial Sequence:  Enzymatic Nucleic Acid
ccctaaaaggctagctacaacgataacatct

SEQ ID NO: 17968 - DNA, 31 bp, Artificial Sequence
  Description of Artificial Sequence:  Enzymatic Nucleic Acid
ggcacgggggctagctacaacgaccctaaaa

SEQ ID NO: 17969 - DNA, 31 bp, Artificial Sequence
  Description of Artificial Sequence:  Enzymatic Nucleic Acid
acaaggcaggctagctacaacgagggtccct

SEQ ID NO: 17970 - DNA, 31 bp, Artificial Sequence
  Description of Artificial Sequence:  Enzymatic Nucleic Acid
aaacaaggggctagctacaacgaacgggtcc

SEQ ID NO: 17971 - DNA, 31 bp, Artificial Sequence
  Description of Artificial Sequence:  Enzymatic Nucleic Acid
ctaggaaaggctagctacaacgaaaggcacg

SEQ ID NO: 17972 - DNA, 31 bp, Artificial Sequence
  Description of Artificial Sequence:  Enzymatic Nucleic Acid
cttgtgggggctagctacaacgataggaaac

SEQ ID NO: 17973 - DNA, 31 bp, Artificial Sequence
  Description of Artificial Sequence:  Enzymatic Nucleic Acid
cattcttgggctagctacaacgagggctagg

SEQ ID NO: 17974 - DNA, 31 bp, Artificial Sequence
  Description of Artificial Sequence:  Enzymatic Nucleic Acid
tgtttgcaggctagctacaacgatcttgtgg

SEQ ID NO: 17975 - DNA, 31 bp, Artificial Sequence
  Description of Artificial Sequence:  Enzymatic Nucleic Acid
gatgtttgggctagctacaacgaattcttgt

SEQ ID NO: 17976 - DNA, 31 bp, Artificial Sequence
  Description of Artificial Sequence:  Enzymatic Nucleic Acid
gtttgatgggctagctacaacgattgcattc

SEQ ID NO: 17977 - DNA, 31 bp, Artificial Sequence
  Description of Artificial Sequence:  Enzymatic Nucleic Acid
ctgtttgaggctagctacaacgagtttgcat

SEQ ID NO: 17978 - DNA, 31 bp, Artificial Sequence
  Description of Artificial Sequence:  Enzymatic Nucleic Acid
agtatctgggctagctacaacgattgatgtt

SEQ ID NO: 17979 - DNA, 31 bp, Artificial Sequence
  Description of Artificial Sequence:  Enzymatic Nucleic Acid
agcgagtaggctagctacaacgactgtttga

SEQ ID NO: 17980 - DNA, 31 bp, Artificial Sequence
  Description of Artificial Sequence:  Enzymatic Nucleic Acid
ctagcgagggctagctacaacgaatctgttt

SEQ ID NO: 17981 - DNA, 31 bp, Artificial Sequence
  Description of Artificial Sequence:  Enzymatic Nucleic Acid
gaggctagggctagctacaacgagagtatct

SEQ ID NO: 17982 - DNA, 31 bp, Artificial Sequence
  Description of Artificial Sequence:  Enzymatic Nucleic Acid
aaatgaggggctagctacaacgatagcgagt

SEQ ID NO: 17983 - DNA, 31 bp, Artificial Sequence
  Description of Artificial Sequence:  Enzymatic Nucleic Acid
aatttaaaggctagctacaacgagaggctag

SEQ ID NO: 17984 - DNA, 31 bp, Artificial Sequence
  Description of Artificial Sequence:  Enzymatic Nucleic Acid
ttaatcaaggctagctacaacgattaaatga

SEQ ID NO: 17985 - DNA, 31 bp, Artificial Sequence
  Description of Artificial Sequence:  Enzymatic Nucleic Acid
tcctttaaggctagctacaacgacaatttaa

SEQ ID NO: 17986 - DNA, 31 bp, Artificial Sequence
  Description of Artificial Sequence:  Enzymatic Nucleic Acid
aagatgcaggctagctacaacgatcctcctt

SEQ ID NO: 17987 - DNA, 31 bp, Artificial Sequence
  Description of Artificial Sequence:  Enzymatic Nucleic Acid
caaagatgggctagctacaacgaactcctcc

SEQ ID NO: 17988 - DNA, 31 bp, Artificial Sequence
  Description of Artificial Sequence:  Enzymatic Nucleic Acid
gccaaagaggctagctacaacgagcactcct

SEQ ID NO: 17989 - DNA, 31 bp, Artificial Sequence
  Description of Artificial Sequence:  Enzymatic Nucleic Acid
actgtcggggctagctacaacgacaaagatg

SEQ ID NO: 17990 - DNA, 31 bp, Artificial Sequence
  Description of Artificial Sequence:  Enzymatic Nucleic Acid
caccactgggctagctacaacgacggccaaa

SEQ ID NO: 17991 - DNA, 31 bp, Artificial Sequence
  Description of Artificial Sequence:  Enzymatic Nucleic Acid
ttacaccaggctagctacaacgatgtcggcc

SEQ ID NO: 17992 - DNA, 31 bp, Artificial Sequence
  Description of Artificial Sequence:  Enzymatic Nucleic Acid
cagttacaggctagctacaacgacactgtcg

SEQ ID NO: 17993 - DNA, 31 bp, Artificial Sequence
  Description of Artificial Sequence:  Enzymatic Nucleic Acid
cacagttaggctagctacaacgaaccactgt

SEQ ID NO: 17994 - DNA, 31 bp, Artificial Sequence
  Description of Artificial Sequence:  Enzymatic Nucleic Acid
acacacagggctagctacaacgatacaccac

SEQ ID NO: 17995 - DNA, 31 bp, Artificial Sequence
  Description of Artificial Sequence:  Enzymatic Nucleic Acid
cacacacaggctagctacaacgaagttacac

SEQ ID NO: 17996 - DNA, 31 bp, Artificial Sequence
  Description of Artificial Sequence:  Enzymatic Nucleic Acid
cacacacaggctagctacaacgaacagttac

SEQ ID NO: 17997 - DNA, 31 bp, Artificial Sequence
  Description of Artificial Sequence:  Enzymatic Nucleic Acid
cacacacaggctagctacaacgaacacagtt

SEQ ID NO: 17998 - DNA, 31 bp, Artificial Sequence
  Description of Artificial Sequence:  Enzymatic Nucleic Acid
cacacacaggctagctacaacgaacacacag

SEQ ID NO: 17999 - DNA, 31 bp, Artificial Sequence
  Description of Artificial Sequence:  Enzymatic Nucleic Acid
cacacacaggctagctacaacgaacacacac

SEQ ID NO: 18000 - DNA, 31 bp, Artificial Sequence
  Description of Artificial Sequence:  Enzymatic Nucleic Acid
cccacacaggctagctacaacgaacacacac

SEQ ID NO: 18001 - DNA, 31 bp, Artificial Sequence
  Description of Artificial Sequence:  Enzymatic Nucleic Acid
cacccacaggctagctacaacgaacacacac

SEQ ID NO: 18002 - DNA, 31 bp, Artificial Sequence
  Description of Artificial Sequence:  Enzymatic Nucleic Acid
cacacccaggctagctacaacgaacacacac

SEQ ID NO: 18003 - DNA, 31 bp, Artificial Sequence
  Description of Artificial Sequence:  Enzymatic Nucleic Acid
cacccacaggctagctacaacgaccacacac

SEQ ID NO: 18004 - DNA, 31 bp, Artificial Sequence
  Description of Artificial Sequence:  Enzymatic Nucleic Acid
tacacccaggctagctacaacgaacccacac

SEQ ID NO: 18005 - DNA, 31 bp, Artificial Sequence
  Description of Artificial Sequence:  Enzymatic Nucleic Acid
cacatacaggctagctacaacgaccacaccc

SEQ ID NO: 18006 - DNA, 31 bp, Artificial Sequence
  Description of Artificial Sequence:  Enzymatic Nucleic Acid
cacacataggctagctacaacgaacccacac

SEQ ID NO: 18007 - DNA, 31 bp, Artificial Sequence
  Description of Artificial Sequence:  Enzymatic Nucleic Acid
aacacacaggctagctacaacgaacacccac

SEQ ID NO: 18008 - DNA, 31 bp, Artificial Sequence
  Description of Artificial Sequence:  Enzymatic Nucleic Acid
aaaacacaggctagctacaacgaatacaccc

SEQ ID NO: 18009 - DNA, 31 bp, Artificial Sequence
  Description of Artificial Sequence:  Enzymatic Nucleic Acid
acaaaacaggctagctacaacgaacatacac

SEQ ID NO: 18010 - DNA, 31 bp, Artificial Sequence
  Description of Artificial Sequence:  Enzymatic Nucleic Acid
gcacaaaaggctagctacaacgaacacatac

SEQ ID NO: 18011 - DNA, 31 bp, Artificial Sequence
  Description of Artificial Sequence:  Enzymatic Nucleic Acid
gttatgcaggctagctacaacgaaaaacaca

SEQ ID NO: 18012 - DNA, 31 bp, Artificial Sequence
  Description of Artificial Sequence:  Enzymatic Nucleic Acid
tagttatgggctagctacaacgaacaaaaca

SEQ ID NO: 18013 - DNA, 31 bp, Artificial Sequence
  Description of Artificial Sequence:  Enzymatic Nucleic Acid
aatagttaggctagctacaacgagcacaaaa

SEQ ID NO: 18014 - DNA, 31 bp, Artificial Sequence
  Description of Artificial Sequence:  Enzymatic Nucleic Acid
ttaaatagggctagctacaacgatatgcaca

SEQ ID NO: 18015 - DNA, 31 bp, Artificial Sequence
  Description of Artificial Sequence:  Enzymatic Nucleic Acid
tccttaaaggctagctacaacgaagttatgc

SEQ ID NO: 18016 - DNA, 31 bp, Artificial Sequence
  Description of Artificial Sequence:  Enzymatic Nucleic Acid
aattccagggctagctacaacgattccttaa

SEQ ID NO: 18017 - DNA, 31 bp, Artificial Sequence
  Description of Artificial Sequence:  Enzymatic Nucleic Acid
ctttaaaaggctagctacaacgatccagttt

SEQ ID NO: 18018 - DNA, 31 bp, Artificial Sequence
  Description of Artificial Sequence:  Enzymatic Nucleic Acid
aaaagtaaggctagctacaacgatttaaaat

SEQ ID NO: 18019 - DNA, 31 bp, Artificial Sequence
  Description of Artificial Sequence:  Enzymatic Nucleic Acid
tataaaagggctagctacaacgaaactttaa

SEQ ID NO: 18020 - DNA, 31 bp, Artificial Sequence
  Description of Artificial Sequence:  Enzymatic Nucleic Acid
ggtttgtaggctagctacaacgaaaaagtaa

SEQ ID NO: 18021 - DNA, 31 bp, Artificial Sequence
  Description of Artificial Sequence:  Enzymatic Nucleic Acid
ttggtttgggctagctacaacgaataaaagt

SEQ ID NO: 18022 - DNA, 31 bp, Artificial Sequence
  Description of Artificial Sequence:  Enzymatic Nucleic Acid
attcttggggctagctacaacgattgtataa

SEQ ID NO: 18023 - DNA, 31 bp, Artificial Sequence
  Description of Artificial Sequence:  Enzymatic Nucleic Acid
agcatataggctagctacaacgatcttggtt

SEQ ID NO: 18024 - DNA, 31 bp, Artificial Sequence
  Description of Artificial Sequence:  Enzymatic Nucleic Acid
gtagcataggctagctacaacgaattcttgg

SEQ ID NO: 18025 - DNA, 31 bp, Artificial Sequence
  Description of Artificial Sequence:  Enzymatic Nucleic Acid
ctgtagcaggctagctacaacgaatattctt

SEQ ID NO: 18026 - DNA, 31 bp, Artificial Sequence
  Description of Artificial Sequence:  Enzymatic Nucleic Acid
atctgtagggctagctacaacgaatatattc

SEQ ID NO: 18027 - DNA, 31 bp, Artificial Sequence
  Description of Artificial Sequence:  Enzymatic Nucleic Acid
tatatctgggctagctacaacgaagcatata

SEQ ID NO: 18028 - DNA, 31 bp, Artificial Sequence
  Description of Artificial Sequence:  Enzymatic Nucleic Acid
gtcttataggctagctacaacgactgtagca

SEQ ID NO: 18029 - DNA, 31 bp, Artificial Sequence
  Description of Artificial Sequence:  Enzymatic Nucleic Acid
ctgtcttaggctagctacaacgaatctgtag

SEQ ID NO: 18030 - DNA, 31 bp, Artificial Sequence
  Description of Artificial Sequence:  Enzymatic Nucleic Acid
catgtctgggctagctacaacgacttatatc

SEQ ID NO: 18031 - DNA, 31 bp, Artificial Sequence
  Description of Artificial Sequence:  Enzymatic Nucleic Acid
aaaccatgggctagctacaacgactgtctta

SEQ ID NO: 18032 - DNA, 31 bp, Artificial Sequence
  Description of Artificial Sequence:  Enzymatic Nucleic Acid
ccaaaccaggctagctacaacgagtctgtct

SEQ ID NO: 18033 - DNA, 31 bp, Artificial Sequence
  Description of Artificial Sequence:  Enzymatic Nucleic Acid
ggaccaaaggctagctacaacgacatgtctg

SEQ ID NO: 18034 - DNA, 31 bp, Artificial Sequence
  Description of Artificial Sequence:  Enzymatic Nucleic Acid
atataggaggctagctacaacgacaaaccat

SEQ ID NO: 18035 - DNA, 31 bp, Artificial Sequence
  Description of Artificial Sequence:  Enzymatic Nucleic Acid
tagaaataggctagctacaacgaaggaccaa

SEQ ID NO: 18036 - DNA, 31 bp, Artificial Sequence
  Description of Artificial Sequence:  Enzymatic Nucleic Acid
actagaaaggctagctacaacgaataggacc

SEQ ID NO: 18037 - DNA, 31 bp, Artificial Sequence
  Description of Artificial Sequence:  Enzymatic Nucleic Acid
catcatgaggctagctacaacgatagaaata

SEQ ID NO: 18038 - DNA, 31 bp, Artificial Sequence
  Description of Artificial Sequence:  Enzymatic Nucleic Acid
attcatcaggctagctacaacgagactagaa

SEQ ID NO: 18039 - DNA, 31 bp, Artificial Sequence
  Description of Artificial Sequence:  Enzymatic Nucleic Acid
tacattcaggctagctacaacgacatgacta

SEQ ID NO: 18040 - DNA, 31 bp, Artificial Sequence
  Description of Artificial Sequence:  Enzymatic Nucleic Acid
aaaatacaggctagctacaacgatcatcatg

SEQ ID NO: 18041 - DNA, 31 bp, Artificial Sequence
  Description of Artificial Sequence:  Enzymatic Nucleic Acid
acaaaataggctagctacaacgaattcatca

SEQ ID NO: 18042 - DNA, 31 bp, Artificial Sequence
  Description of Artificial Sequence:  Enzymatic Nucleic Acid
atacaaaaggctagctacaacgaacattcat

SEQ ID NO: 18043 - DNA, 31 bp, Artificial Sequence
  Description of Artificial Sequence:  Enzymatic Nucleic Acid
atggtataggctagctacaacgaaaaataca

SEQ ID NO: 18044 - DNA, 31 bp, Artificial Sequence
  Description of Artificial Sequence:  Enzymatic Nucleic Acid
agatggtaggctagctacaacgaacaaaata

SEQ ID NO: 18045 - DNA, 31 bp, Artificial Sequence
  Description of Artificial Sequence:  Enzymatic Nucleic Acid
gaagatggggctagctacaacgaatacaaaa

SEQ ID NO: 18046 - DNA, 31 bp, Artificial Sequence
  Description of Artificial Sequence:  Enzymatic Nucleic Acid
tatgaagaggctagctacaacgaggtataca

SEQ ID NO: 18047 - DNA, 31 bp, Artificial Sequence
  Description of Artificial Sequence:  Enzymatic Nucleic Acid
atattataggctagctacaacgagaagatgg

SEQ ID NO: 18048 - DNA, 31 bp, Artificial Sequence
  Description of Artificial Sequence:  Enzymatic Nucleic Acid
gtatattaggctagctacaacgaatgaagat

SEQ ID NO: 18049 - DNA, 31 bp, Artificial Sequence
  Description of Artificial Sequence:  Enzymatic Nucleic Acid
taagtataggctagctacaacgatatatgaa

SEQ ID NO: 18050 - DNA, 31 bp, Artificial Sequence
  Description of Artificial Sequence:  Enzymatic Nucleic Acid
tttaagtaggctagctacaacgaattatatg

SEQ ID NO: 18051 - DNA, 31 bp, Artificial Sequence
  Description of Artificial Sequence:  Enzymatic Nucleic Acid
tttttaagggctagctacaacgaatattata

SEQ ID NO: 18052 - DNA, 31 bp, Artificial Sequence
  Description of Artificial Sequence:  Enzymatic Nucleic Acid
aagaaataggctagctacaacgattttaagt

SEQ ID NO: 18053 - DNA, 31 bp, Artificial Sequence
  Description of Artificial Sequence:  Enzymatic Nucleic Acid
ttaagaaaggctagctacaacgaatttttaa

SEQ ID NO: 18054 - DNA, 31 bp, Artificial Sequence
  Description of Artificial Sequence:  Enzymatic Nucleic Acid
aatcccaaggctagctacaacgataagaaat

SEQ ID NO: 18055 - DNA, 31 bp, Artificial Sequence
  Description of Artificial Sequence:  Enzymatic Nucleic Acid
attacaaaggctagctacaacgacccaatta

SEQ ID NO: 18056 - DNA, 31 bp, Artificial Sequence
  Description of Artificial Sequence:  Enzymatic Nucleic Acid
tacgattaggctagctacaacgaaaatccca

SEQ ID NO: 18057 - DNA, 31 bp, Artificial Sequence
  Description of Artificial Sequence:  Enzymatic Nucleic Acid
tggtacgaggctagctacaacgatacaaatc

SEQ ID NO: 18058 - DNA, 31 bp, Artificial Sequence
  Description of Artificial Sequence:  Enzymatic Nucleic Acid
agttggtaggctagctacaacgagattacaa

SEQ ID NO: 18059 - DNA, 31 bp, Artificial Sequence
  Description of Artificial Sequence:  Enzymatic Nucleic Acid
taagttggggctagctacaacgaacgattac

SEQ ID NO: 18060 - DNA, 31 bp, Artificial Sequence
  Description of Artificial Sequence:  Enzymatic Nucleic Acid
caattaagggctagctacaacgatggtacga

SEQ ID NO: 18061 - DNA, 31 bp, Artificial Sequence
  Description of Artificial Sequence:  Enzymatic Nucleic Acid
tttatcaaggctagctacaacgataagttgg

SEQ ID NO: 18062 - DNA, 31 bp, Artificial Sequence
  Description of Artificial Sequence:  Enzymatic Nucleic Acid
caagtttaggctagctacaacgacaattaag

SEQ ID NO: 18063 - DNA, 31 bp, Artificial Sequence
  Description of Artificial Sequence:  Enzymatic Nucleic Acid
ttgccaagggctagctacaacgattatcaat

SEQ ID NO: 18064 - DNA, 31 bp, Artificial Sequence
  Description of Artificial Sequence:  Enzymatic Nucleic Acid
agcagttgggctagctacaacgacaagttta

SEQ ID NO: 18065 - DNA, 31 bp, Artificial Sequence
  Description of Artificial Sequence:  Enzymatic Nucleic Acid
aaaagcagggctagctacaacgatgccaagt

SEQ ID NO: 18066 - DNA, 31 bp, Artificial Sequence
  Description of Artificial Sequence:  Enzymatic Nucleic Acid
cataaaagggctagctacaacgaagttgcca

SEQ ID NO: 18067 - DNA, 31 bp, Artificial Sequence
  Description of Artificial Sequence:  Enzymatic Nucleic Acid
acagaacaggctagctacaacgaaaaagcag

SEQ ID NO: 18068 - DNA, 31 bp, Artificial Sequence
  Description of Artificial Sequence:  Enzymatic Nucleic Acid
agacagaaggctagctacaacgaataaaagc

SEQ ID NO: 18069 - DNA, 31 bp, Artificial Sequence
  Description of Artificial Sequence:  Enzymatic Nucleic Acid
gaaggagaggctagctacaacgaagaacata

SEQ ID NO: 18070 - DNA, 31 bp, Artificial Sequence
  Description of Artificial Sequence:  Enzymatic Nucleic Acid
aaaatttaggctagctacaacgaggaaggag

SEQ ID NO: 18071 - DNA, 31 bp, Artificial Sequence
  Description of Artificial Sequence:  Enzymatic Nucleic Acid
ttgaaaaaggctagctacaacgattatggaa

SEQ ID NO: 18072 - DNA, 31 bp, Artificial Sequence
  Description of Artificial Sequence:  Enzymatic Nucleic Acid
aattagtaggctagctacaacgatttgaaaa

SEQ ID NO: 18073 - DNA, 31 bp, Artificial Sequence
  Description of Artificial Sequence:  Enzymatic Nucleic Acid
tgaattagggctagctacaacgaattttgaa

SEQ ID NO: 18074 - DNA, 31 bp, Artificial Sequence
  Description of Artificial Sequence:  Enzymatic Nucleic Acid
ttgttgaaggctagctacaacgatagtattt

SEQ ID NO: 18075 - DNA, 31 bp, Artificial Sequence
  Description of Artificial Sequence:  Enzymatic Nucleic Acid
tttctttgggctagctacaacgatgaattag

SEQ ID NO: 18076 - DNA, 31 bp, Artificial Sequence
  Description of Artificial Sequence:  Enzymatic Nucleic Acid
aaaaagagggctagctacaacgatttttctt

SEQ ID NO: 18077 - DNA, 31 bp, Artificial Sequence
  Description of Artificial Sequence:  Enzymatic Nucleic Acid
tgagtttaggctagctacaacgatttaggaa

SEQ ID NO: 18078 - DNA, 31 bp, Artificial Sequence
  Description of Artificial Sequence:  Enzymatic Nucleic Acid
aatttgagggctagctacaacgattatttta

SEQ ID NO: 18079 - DNA, 31 bp, Artificial Sequence
  Description of Artificial Sequence:  Enzymatic Nucleic Acid
aggataaaggctagctacaacgattgagttt

SEQ ID NO: 18080 - DNA, 31 bp, Artificial Sequence
  Description of Artificial Sequence:  Enzymatic Nucleic Acid
aacaaggaggctagctacaacgaaaatttga

SEQ ID NO: 18081 - DNA, 31 bp, Artificial Sequence
  Description of Artificial Sequence:  Enzymatic Nucleic Acid
gctctaaaggctagctacaacgaaaggataa

SEQ ID NO: 18082 - DNA, 31 bp, Artificial Sequence
  Description of Artificial Sequence:  Enzymatic Nucleic Acid
tttctctgggctagctacaacgatctaaaca

SEQ ID NO: 18083 - DNA, 31 bp, Artificial Sequence
  Description of Artificial Sequence:  Enzymatic Nucleic Acid
tttcttaaggctagctacaacgattttctct

SEQ ID NO: 18084 - DNA, 31 bp, Artificial Sequence
  Description of Artificial Sequence:  Enzymatic Nucleic Acid
tttcaaagggctagctacaacgattttctta

SEQ ID NO: 18085 - DNA, 31 bp, Artificial Sequence
  Description of Artificial Sequence:  Enzymatic Nucleic Acid
tgagaccaggctagctacaacgattcaaagt

SEQ ID NO: 18086 - DNA, 31 bp, Artificial Sequence
  Description of Artificial Sequence:  Enzymatic Nucleic Acid
ttttgagaggctagctacaacgacatttcaa

SEQ ID NO: 18087 - DNA, 31 bp, Artificial Sequence
  Description of Artificial Sequence:  Enzymatic Nucleic Acid
tttagcaaggctagctacaacgatttttgag

SEQ ID NO: 18088 - DNA, 31 bp, Artificial Sequence
  Description of Artificial Sequence:  Enzymatic Nucleic Acid
atatttagggctagctacaacgaaatttttt

SEQ ID NO: 18089 - DNA, 31 bp, Artificial Sequence
  Description of Artificial Sequence:  Enzymatic Nucleic Acid
tgaaaataggctagctacaacgattagcaat

SEQ ID NO: 18090 - DNA, 31 bp, Artificial Sequence
  Description of Artificial Sequence:  Enzymatic Nucleic Acid
attgaaaaggctagctacaacgaatttagca

SEQ ID NO: 18091 - DNA, 31 bp, Artificial Sequence
  Description of Artificial Sequence:  Enzymatic Nucleic Acid
gttttccaggctagctacaacgatgaaaata

SEQ ID NO: 18092 - DNA, 31 bp, Artificial Sequence
  Description of Artificial Sequence:  Enzymatic Nucleic Acid
acatttagggctagctacaacgatttccatt

SEQ ID NO: 18093 - DNA, 31 bp, Artificial Sequence
  Description of Artificial Sequence:  Enzymatic Nucleic Acid
aactaacaggctagctacaacgattagtttt

SEQ ID NO: 18094 - DNA, 31 bp, Artificial Sequence
  Description of Artificial Sequence:  Enzymatic Nucleic Acid
taaactaaggctagctacaacgaatttagtt

SEQ ID NO: 18095 - DNA, 31 bp, Artificial Sequence
  Description of Artificial Sequence:  Enzymatic Nucleic Acid
cagctaaaggctagctacaacgataacattt

SEQ ID NO: 18096 - DNA, 31 bp, Artificial Sequence
  Description of Artificial Sequence:  Enzymatic Nucleic Acid
acaatcagggctagctacaacgataaactaa

SEQ ID NO: 18097 - DNA, 31 bp, Artificial Sequence
  Description of Artificial Sequence:  Enzymatic Nucleic Acid
ccatacaaggctagctacaacgacagctaaa

SEQ ID NO: 18098 - DNA, 31 bp, Artificial Sequence
  Description of Artificial Sequence:  Enzymatic Nucleic Acid
accccataggctagctacaacgaaatcagct

SEQ ID NO: 18099 - DNA, 31 bp, Artificial Sequence
  Description of Artificial Sequence:  Enzymatic Nucleic Acid
aaaccccaggctagctacaacgaacaatcag

SEQ ID NO: 18100 - DNA, 31 bp, Artificial Sequence
  Description of Artificial Sequence:  Enzymatic Nucleic Acid
ttcgaaaaggctagctacaacgacccataca

SEQ ID NO: 18101 - DNA, 31 bp, Artificial Sequence
  Description of Artificial Sequence:  Enzymatic Nucleic Acid
gtgaaaggggctagctacaacgatcgaaaac

SEQ ID NO: 18102 - DNA, 31 bp, Artificial Sequence
  Description of Artificial Sequence:  Enzymatic Nucleic Acid
acaaaaagggctagctacaacgagaaaggtt

SEQ ID NO: 18103 - DNA, 31 bp, Artificial Sequence
  Description of Artificial Sequence:  Enzymatic Nucleic Acid
aaaacaaaggctagctacaacgaaaaaagtg

SEQ ID NO: 18104 - DNA, 31 bp, Artificial Sequence
  Description of Artificial Sequence:  Enzymatic Nucleic Acid
aggtaaaaggctagctacaacgaaaacaaaa

SEQ ID NO: 18105 - DNA, 31 bp, Artificial Sequence
  Description of Artificial Sequence:  Enzymatic Nucleic Acid
gaaataggggctagctacaacgaaaaacaaa

SEQ ID NO: 18106 - DNA, 31 bp, Artificial Sequence
  Description of Artificial Sequence:  Enzymatic Nucleic Acid
ttgtgaaaggctagctacaacgaaggtaaaa

SEQ ID NO: 18107 - DNA, 31 bp, Artificial Sequence
  Description of Artificial Sequence:  Enzymatic Nucleic Acid
cacagttgggctagctacaacgagaaatagg

SEQ ID NO: 18108 - DNA, 31 bp, Artificial Sequence
  Description of Artificial Sequence:  Enzymatic Nucleic Acid
ttacacagggctagctacaacgatgtgaaat

SEQ ID NO: 18109 - DNA, 31 bp, Artificial Sequence
  Description of Artificial Sequence:  Enzymatic Nucleic Acid
aatttacaggctagctacaacgaagttgtga

SEQ ID NO: 18110 - DNA, 31 bp, Artificial Sequence
  Description of Artificial Sequence:  Enzymatic Nucleic Acid
gcaatttaggctagctacaacgaacagttgt

SEQ ID NO: 18111 - DNA, 31 bp, Artificial Sequence
  Description of Artificial Sequence:  Enzymatic Nucleic Acid
attggcaaggctagctacaacgattacacag

SEQ ID NO: 18112 - DNA, 31 bp, Artificial Sequence
  Description of Artificial Sequence:  Enzymatic Nucleic Acid
attattggggctagctacaacgaaatttaca

SEQ ID NO: 18113 - DNA, 31 bp, Artificial Sequence
  Description of Artificial Sequence:  Enzymatic Nucleic Acid
aggaattaggctagctacaacgatggcaatt

SEQ ID NO: 18114 - DNA, 31 bp, Artificial Sequence
  Description of Artificial Sequence:  Enzymatic Nucleic Acid
gacaggaaggctagctacaacgatattggca

SEQ ID NO: 18115 - DNA, 31 bp, Artificial Sequence
  Description of Artificial Sequence:  Enzymatic Nucleic Acid
ttcatggaggctagctacaacgaaggaatta

SEQ ID NO: 18116 - DNA, 31 bp, Artificial Sequence
  Description of Artificial Sequence:  Enzymatic Nucleic Acid
cattttcaggctagctacaacgaggacagga

SEQ ID NO: 18117 - DNA, 31 bp, Artificial Sequence
  Description of Artificial Sequence:  Enzymatic Nucleic Acid
aatttgcaggctagctacaacgatttcatgg

SEQ ID NO: 18118 - DNA, 31 bp, Artificial Sequence
  Description of Artificial Sequence:  Enzymatic Nucleic Acid
ataatttgggctagctacaacgaattttcat

SEQ ID NO: 18119 - DNA, 31 bp, Artificial Sequence
  Description of Artificial Sequence:  Enzymatic Nucleic Acid
ctggataaggctagctacaacgattgcattt

SEQ ID NO: 18120 - DNA, 31 bp, Artificial Sequence
  Description of Artificial Sequence:  Enzymatic Nucleic Acid
acactggaggctagctacaacgaaatttgca

SEQ ID NO: 18121 - DNA, 31 bp, Artificial Sequence
  Description of Artificial Sequence:  Enzymatic Nucleic Acid
tatctacaggctagctacaacgatggataat

SEQ ID NO: 18122 - DNA, 31 bp, Artificial Sequence
  Description of Artificial Sequence:  Enzymatic Nucleic Acid
tatatctaggctagctacaacgaactggata

SEQ ID NO: 18123 - DNA, 31 bp, Artificial Sequence
  Description of Artificial Sequence:  Enzymatic Nucleic Acid
caaatataggctagctacaacgactacactg

SEQ ID NO: 18124 - DNA, 31 bp, Artificial Sequence
  Description of Artificial Sequence:  Enzymatic Nucleic Acid
gtcaaataggctagctacaacgaatctacac

SEQ ID NO: 18125 - DNA, 31 bp, Artificial Sequence
  Description of Artificial Sequence:  Enzymatic Nucleic Acid
tggtcaaaggctagctacaacgaatatctac

SEQ ID NO: 18126 - DNA, 31 bp, Artificial Sequence
  Description of Artificial Sequence:  Enzymatic Nucleic Acid
ggtgatggggctagctacaacgacaaatata

SEQ ID NO: 18127 - DNA, 31 bp, Artificial Sequence
  Description of Artificial Sequence:  Enzymatic Nucleic Acid
tagggtgaggctagctacaacgaggtcaaat

SEQ ID NO: 18128 - DNA, 31 bp, Artificial Sequence
  Description of Artificial Sequence:  Enzymatic Nucleic Acid
ccatagggggctagctacaacgagatggtca

SEQ ID NO: 18129 - DNA, 31 bp, Artificial Sequence
  Description of Artificial Sequence:  Enzymatic Nucleic Acid
aatatccaggctagctacaacgaagggtgat

SEQ ID NO: 18130 - DNA, 31 bp, Artificial Sequence
  Description of Artificial Sequence:  Enzymatic Nucleic Acid
agccaataggctagctacaacgaccataggg

SEQ ID NO: 18131 - DNA, 31 bp, Artificial Sequence
  Description of Artificial Sequence:  Enzymatic Nucleic Acid
ctagccaaggctagctacaacgaatccatag

SEQ ID NO: 18132 - DNA, 31 bp, Artificial Sequence
  Description of Artificial Sequence:  Enzymatic Nucleic Acid
aaaactagggctagctacaacgacaatatcc

SEQ ID NO: 18133 - DNA, 31 bp, Artificial Sequence
  Description of Artificial Sequence:  Enzymatic Nucleic Acid
aggcaaaaggctagctacaacgatagccaat

SEQ ID NO: 18134 - DNA, 31 bp, Artificial Sequence
  Description of Artificial Sequence:  Enzymatic Nucleic Acid
aataaaggggctagctacaacgaaaaactag

SEQ ID NO: 18135 - DNA, 31 bp, Artificial Sequence
  Description of Artificial Sequence:  Enzymatic Nucleic Acid
ttgcttaaggctagctacaacgaaaaggcaa

SEQ ID NO: 18136 - DNA, 31 bp, Artificial Sequence
  Description of Artificial Sequence:  Enzymatic Nucleic Acid
tgaatttgggctagctacaacgattaataaa

SEQ ID NO: 18137 - DNA, 31 bp, Artificial Sequence
  Description of Artificial Sequence:  Enzymatic Nucleic Acid
gaaatgaaggctagctacaacgattgcttaa

SEQ ID NO: 18138 - DNA, 31 bp, Artificial Sequence
  Description of Artificial Sequence:  Enzymatic Nucleic Acid
ggctgaaaggctagctacaacgagaatttgc

SEQ ID NO: 18139 - DNA, 31 bp, Artificial Sequence
  Description of Artificial Sequence:  Enzymatic Nucleic Acid
cattcaggggctagctacaacgatgaaatga

SEQ ID NO: 18140 - DNA, 31 bp, Artificial Sequence
  Description of Artificial Sequence:  Enzymatic Nucleic Acid
ggcagacaggctagctacaacgatcaggctg

SEQ ID NO: 18141 - DNA, 31 bp, Artificial Sequence
  Description of Artificial Sequence:  Enzymatic Nucleic Acid
taggcagaggctagctacaacgaattcaggc

SEQ ID NO: 18142 - DNA, 31 bp, Artificial Sequence
  Description of Artificial Sequence:  Enzymatic Nucleic Acid
tatataggggctagctacaacgaagacattc

SEQ ID NO: 18143 - DNA, 31 bp, Artificial Sequence
  Description of Artificial Sequence:  Enzymatic Nucleic Acid
agaatataggctagctacaacgaaggcagac

SEQ ID NO: 18144 - DNA, 31 bp, Artificial Sequence
  Description of Artificial Sequence:  Enzymatic Nucleic Acid
agagaataggctagctacaacgaataggcag

SEQ ID NO: 18145 - DNA, 31 bp, Artificial Sequence
  Description of Artificial Sequence:  Enzymatic Nucleic Acid
gcagagaaggctagctacaacgaatataggc

SEQ ID NO: 18146 - DNA, 31 bp, Artificial Sequence
  Description of Artificial Sequence:  Enzymatic Nucleic Acid
acaaagagggctagctacaacgaagagaata

SEQ ID NO: 18147 - DNA, 31 bp, Artificial Sequence
  Description of Artificial Sequence:  Enzymatic Nucleic Acid
ggagaataggctagctacaacgaaaagagca

SEQ ID NO: 18148 - DNA, 31 bp, Artificial Sequence
  Description of Artificial Sequence:  Enzymatic Nucleic Acid
aaggagaaggctagctacaacgaacaaagag

SEQ ID NO: 18149 - DNA, 31 bp, Artificial Sequence
  Description of Artificial Sequence:  Enzymatic Nucleic Acid
ttaacgggggctagctacaacgatcaaagga

SEQ ID NO: 18150 - DNA, 31 bp, Artificial Sequence
  Description of Artificial Sequence:  Enzymatic Nucleic Acid
tgttttaaggctagctacaacgagggttcaa

SEQ ID NO: 18151 - DNA, 31 bp, Artificial Sequence
  Description of Artificial Sequence:  Enzymatic Nucleic Acid
acaggatgggctagctacaacgatttaacgg

SEQ ID NO: 18152 - DNA, 31 bp, Artificial Sequence
  Description of Artificial Sequence:  Enzymatic Nucleic Acid
ccacaggaggctagctacaacgagttttaac

SEQ ID NO: 18153 - DNA, 31 bp, Artificial Sequence
  Description of Artificial Sequence:  Enzymatic Nucleic Acid
gagtgccaggctagctacaacgaaggatgtt

SEQ ID NO: 18154 - RNA, 37 nt, Artificial Sequence
  Description of Artificial Sequence:  Enzymatic Nucleic Acid
gggaggaggccgaaaggcgagugaggucucgagagga

SEQ ID NO: 18155 - RNA, 37 nt, Artificial Sequence
  Description of Artificial Sequence:  Enzymatic Nucleic Acid
cgccgcuggccgaaaggcgagugaggucucggggagg

SEQ ID NO: 18156 - RNA, 37 nt, Artificial Sequence
  Description of Artificial Sequence:  Enzymatic Nucleic Acid
cgccgccggccgaaaggcgagugaggucuugccgggg

SEQ ID NO: 18157 - RNA, 37 nt, Artificial Sequence
  Description of Artificial Sequence:  Enzymatic Nucleic Acid
agccgccggccgaaaggcgagugaggucucgcugccg

SEQ ID NO: 18158 - RNA, 37 nt, Artificial Sequence
  Description of Artificial Sequence:  Enzymatic Nucleic Acid
ccgagccggccgaaaggcgagugaggucucgccgcug

SEQ ID NO: 18159 - RNA, 37 nt, Artificial Sequence
  Description of Artificial Sequence:  Enzymatic Nucleic Acid
gcuccgaggccgaaaggcgagugaggucucgccgccg

SEQ ID NO: 18160 - RNA, 37 nt, Artificial Sequence
  Description of Artificial Sequence:  Enzymatic Nucleic Acid
ggagcccggccgaaaggcgagugaggucuuccgagcc

SEQ ID NO: 18161 - RNA, 37 nt, Artificial Sequence
  Description of Artificial Sequence:  Enzymatic Nucleic Acid
ccccggaggccgaaaggcgagugaggucuccgcuccg

SEQ ID NO: 18162 - RNA, 37 nt, Artificial Sequence
  Description of Artificial Sequence:  Enzymatic Nucleic Acid
cacccgaggccgaaaggcgagugaggucucccggagc

SEQ ID NO: 18163 - RNA, 37 nt, Artificial Sequence
  Description of Artificial Sequence:  Enzymatic Nucleic Acid
ccgcugcagccgaaaggcgagugaggucuccgagccc

SEQ ID NO: 18164 - RNA, 37 nt, Artificial Sequence
  Description of Artificial Sequence:  Enzymatic Nucleic Acid
ggccgcuggccgaaaggcgagugaggucuacccgagc

SEQ ID NO: 18165 - RNA, 37 nt, Artificial Sequence
  Description of Artificial Sequence:  Enzymatic Nucleic Acid
gcuggccggccgaaaggcgagugaggucuugcacccg

SEQ ID NO: 18166 - RNA, 37 nt, Artificial Sequence
  Description of Artificial Sequence:  Enzymatic Nucleic Acid
cccgcugggccgaaaggcgagugaggucucgcugcac

SEQ ID NO: 18167 - RNA, 37 nt, Artificial Sequence
  Description of Artificial Sequence:  Enzymatic Nucleic Acid
caggcccggccgaaaggcgagugaggucuuggccgcu

SEQ ID NO: 18168 - RNA, 37 nt, Artificial Sequence
  Description of Artificial Sequence:  Enzymatic Nucleic Acid
ccgccagggccgaaaggcgagugaggucuccgcuggc

SEQ ID NO: 18169 - RNA, 37 nt, Artificial Sequence
  Description of Artificial Sequence:  Enzymatic Nucleic Acid
ccucgccggccgaaaggcgagugaggucucaggcccg

SEQ ID NO: 18170 - RNA, 37 nt, Artificial Sequence
  Description of Artificial Sequence:  Enzymatic Nucleic Acid
aauccucggccgaaaggcgagugaggucucgccaggc

SEQ ID NO: 18171 - RNA, 37 nt, Artificial Sequence
  Description of Artificial Sequence:  Enzymatic Nucleic Acid
gacaaccagccgaaaggcgagugaggucuuuccccgg

SEQ ID NO: 18172 - RNA, 37 nt, Artificial Sequence
  Description of Artificial Sequence:  Enzymatic Nucleic Acid
ggagacaagccgaaaggcgagugaggucucacuuccc

SEQ ID NO: 18173 - RNA, 37 nt, Artificial Sequence
  Description of Artificial Sequence:  Enzymatic Nucleic Acid
ccaggagagccgaaaggcgagugaggucuaaccacuu

SEQ ID NO: 18174 - RNA, 37 nt, Artificial Sequence
  Description of Artificial Sequence:  Enzymatic Nucleic Acid
ggcuccaggccgaaaggcgagugaggucucaggagac

SEQ ID NO: 18175 - RNA, 37 nt, Artificial Sequence
  Description of Artificial Sequence:  Enzymatic Nucleic Acid
ucucgcgggccgaaaggcgagugaggucuuccagcca

SEQ ID NO: 18176 - RNA, 37 nt, Artificial Sequence
  Description of Artificial Sequence:  Enzymatic Nucleic Acid
ccgucucggccgaaaggcgagugaggucuggcuccag

SEQ ID NO: 18177 - RNA, 37 nt, Artificial Sequence
  Description of Artificial Sequence:  Enzymatic Nucleic Acid
ccugagcggccgaaaggcgagugaggucuccgucucg

SEQ ID NO: 18178 - RNA, 37 nt, Artificial Sequence
  Description of Artificial Sequence:  Enzymatic Nucleic Acid
gcccugaggccgaaaggcgagugaggucugcccgucu

SEQ ID NO: 18179 - RNA, 37 nt, Artificial Sequence
  Description of Artificial Sequence:  Enzymatic Nucleic Acid
gccccgcggccgaaaggcgagugaggucuccugagcg

SEQ ID NO: 18180 - RNA, 37 nt, Artificial Sequence
  Description of Artificial Sequence:  Enzymatic Nucleic Acid
cggccccggccgaaaggcgagugaggucugcccugag

SEQ ID NO: 18181 - RNA, 37 nt, Artificial Sequence
  Description of Artificial Sequence:  Enzymatic Nucleic Acid
gccgccgggccgaaaggcgagugaggucucccgcgcc

SEQ ID NO: 18182 - RNA, 37 nt, Artificial Sequence
  Description of Artificial Sequence:  Enzymatic Nucleic Acid
cgccgccggccgaaaggcgagugaggucucggccccg

SEQ ID NO: 18183 - RNA, 37 nt, Artificial Sequence
  Description of Artificial Sequence:  Enzymatic Nucleic Acid
guucgccggccgaaaggcgagugaggucucgccggcc

SEQ ID NO: 18184 - RNA, 37 nt, Artificial Sequence
  Description of Artificial Sequence:  Enzymatic Nucleic Acid
cucguucggccgaaaggcgagugaggucucgccgccg

SEQ ID NO: 18185 - RNA, 37 nt, Artificial Sequence
  Description of Artificial Sequence:  Enzymatic Nucleic Acid
cccggccggccgaaaggcgagugaggucucagagucc

SEQ ID NO: 18186 - RNA, 37 nt, Artificial Sequence
  Description of Artificial Sequence:  Enzymatic Nucleic Acid
cgacccgggccgaaaggcgagugaggucucgccagag

SEQ ID NO: 18187 - RNA, 37 nt, Artificial Sequence
  Description of Artificial Sequence:  Enzymatic Nucleic Acid
gccaacgagccgaaaggcgagugaggucuccggccgc

SEQ ID NO: 18188 - RNA, 37 nt, Artificial Sequence
  Description of Artificial Sequence:  Enzymatic Nucleic Acid
ccggccaagccgaaaggcgagugaggucugacccggc

SEQ ID NO: 18189 - RNA, 37 nt, Artificial Sequence
  Description of Artificial Sequence:  Enzymatic Nucleic Acid
ucccccgggccgaaaggcgagugaggucucaacgacc

SEQ ID NO: 18190 - RNA, 37 nt, Artificial Sequence
  Description of Artificial Sequence:  Enzymatic Nucleic Acid
ugcccgcggccgaaaggcgagugaggucuucccccgg

SEQ ID NO: 18191 - RNA, 37 nt, Artificial Sequence
  Description of Artificial Sequence:  Enzymatic Nucleic Acid
ggugcccggccgaaaggcgagugaggucugcuccccc

SEQ ID NO: 18192 - RNA, 37 nt, Artificial Sequence
  Description of Artificial Sequence:  Enzymatic Nucleic Acid
gcccgguggccgaaaggcgagugaggucuccgcgcuc

SEQ ID NO: 18193 - RNA, 37 nt, Artificial Sequence
  Description of Artificial Sequence:  Enzymatic Nucleic Acid
ccugcucggccgaaaggcgagugaggucuccggugcc

SEQ ID NO: 18194 - RNA, 37 nt, Artificial Sequence
  Description of Artificial Sequence:  Enzymatic Nucleic Acid
gcggccuggccgaaaggcgagugaggucuucgcccgg

SEQ ID NO: 18195 - RNA, 37 nt, Artificial Sequence
  Description of Artificial Sequence:  Enzymatic Nucleic Acid
cgacgcgggccgaaaggcgagugaggucucugcucgc

SEQ ID NO: 18196 - RNA, 37 nt, Artificial Sequence
  Description of Artificial Sequence:  Enzymatic Nucleic Acid
gcgcgacggccgaaaggcgagugaggucuggccugcu

SEQ ID NO: 18197 - RNA, 37 nt, Artificial Sequence
  Description of Artificial Sequence:  Enzymatic Nucleic Acid
gagcgcgagccgaaaggcgagugaggucugcggccug

SEQ ID NO: 18198 - RNA, 37 nt, Artificial Sequence
  Description of Artificial Sequence:  Enzymatic Nucleic Acid
ggugagcggccgaaaggcgagugaggucugacgcggc

SEQ ID NO: 18199 - RNA, 37 nt, Artificial Sequence
  Description of Artificial Sequence:  Enzymatic Nucleic Acid
auggugaggccgaaaggcgagugaggucugcgacgcg

SEQ ID NO: 18200 - RNA, 37 nt, Artificial Sequence
  Description of Artificial Sequence:  Enzymatic Nucleic Acid
guagcugagccgaaaggcgagugaggucucaugguga

SEQ ID NO: 18201 - RNA, 37 nt, Artificial Sequence
  Description of Artificial Sequence:  Enzymatic Nucleic Acid
cccaguaggccgaaaggcgagugaggucuugaccaug

SEQ ID NO: 18202 - RNA, 37 nt, Artificial Sequence
  Description of Artificial Sequence:  Enzymatic Nucleic Acid
cagcaggagccgaaaggcgagugaggucucccggugu

SEQ ID NO: 18203 - RNA, 37 nt, Artificial Sequence
  Description of Artificial Sequence:  Enzymatic Nucleic Acid
gcgcacaggccgaaaggcgagugaggucuaggacccc

SEQ ID NO: 18204 - RNA, 37 nt, Artificial Sequence
  Description of Artificial Sequence:  Enzymatic Nucleic Acid
agcgcgcagccgaaaggcgagugaggucuagcaggac

SEQ ID NO: 18205 - RNA, 37 nt, Artificial Sequence
  Description of Artificial Sequence:  Enzymatic Nucleic Acid
gcagcgcggccgaaaggcgagugaggucuacagcagg

SEQ ID NO: 18206 - RNA, 37 nt, Artificial Sequence
  Description of Artificial Sequence:  Enzymatic Nucleic Acid
gagcagcggccgaaaggcgagugaggucugcacagca

SEQ ID NO: 18207 - RNA, 37 nt, Artificial Sequence
  Description of Artificial Sequence:  Enzymatic Nucleic Acid
cugagcaggccgaaaggcgagugaggucugcgcacag

SEQ ID NO: 18208 - RNA, 37 nt, Artificial Sequence
  Description of Artificial Sequence:  Enzymatic Nucleic Acid
cagcugaggccgaaaggcgagugaggucuagcgcgca

SEQ ID NO: 18209 - RNA, 37 nt, Artificial Sequence
  Description of Artificial Sequence:  Enzymatic Nucleic Acid
gcagacaggccgaaaggcgagugaggucuugagcagc

SEQ ID NO: 18210 - RNA, 37 nt, Artificial Sequence
  Description of Artificial Sequence:  Enzymatic Nucleic Acid
gaagcagagccgaaaggcgagugaggucuagcugagc

SEQ ID NO: 18211 - RNA, 37 nt, Artificial Sequence
  Description of Artificial Sequence:  Enzymatic Nucleic Acid
gugagaaggccgaaaggcgagugaggucuagacagcu

SEQ ID NO: 18212 - RNA, 37 nt, Artificial Sequence
  Description of Artificial Sequence:  Enzymatic Nucleic Acid
aaccugaagccgaaaggcgagugaggucuuagauccu

SEQ ID NO: 18213 - RNA, 37 nt, Artificial Sequence
  Description of Artificial Sequence:  Enzymatic Nucleic Acid
auuuugaagccgaaaggcgagugaggucucugaacua

SEQ ID NO: 18214 - RNA, 37 nt, Artificial Sequence
  Description of Artificial Sequence:  Enzymatic Nucleic Acid
cuuuuaaagccgaaaggcgagugaggucuucaguuca

SEQ ID NO: 18215 - RNA, 37 nt, Artificial Sequence
  Description of Artificial Sequence:  Enzymatic Nucleic Acid
gcuggguggccgaaaggcgagugaggucucuuuuaaa

SEQ ID NO: 18216 - RNA, 37 nt, Artificial Sequence
  Description of Artificial Sequence:  Enzymatic Nucleic Acid
augauguggccgaaaggcgagugaggucuugggugcc

SEQ ID NO: 18217 - RNA, 37 nt, Artificial Sequence
  Description of Artificial Sequence:  Enzymatic Nucleic Acid
ccugcuuggccgaaaggcgagugaggucuaugaugug

SEQ ID NO: 18218 - RNA, 37 nt, Artificial Sequence
  Description of Artificial Sequence:  Enzymatic Nucleic Acid
cuggccuggccgaaaggcgagugaggucuuugcauga

SEQ ID NO: 18219 - RNA, 37 nt, Artificial Sequence
  Description of Artificial Sequence:  Enzymatic Nucleic Acid
gugucugggccgaaaggcgagugaggucucugcuugc

SEQ ID NO: 18220 - RNA, 37 nt, Artificial Sequence
  Description of Artificial Sequence:  Enzymatic Nucleic Acid
uggagauggccgaaaggcgagugaggucuagugucug

SEQ ID NO: 18221 - RNA, 37 nt, Artificial Sequence
  Description of Artificial Sequence:  Enzymatic Nucleic Acid
ccccccuggccgaaaggcgagugaggucuauuggaga

SEQ ID NO: 18222 - RNA, 37 nt, Artificial Sequence
  Description of Artificial Sequence:  Enzymatic Nucleic Acid
augggcuggccgaaaggcgagugaggucuuucccccc

SEQ ID NO: 18223 - RNA, 37 nt, Artificial Sequence
  Description of Artificial Sequence:  Enzymatic Nucleic Acid
uuuauggggccgaaaggcgagugaggucuugcuuccc

SEQ ID NO: 18224 - RNA, 37 nt, Artificial Sequence
  Description of Artificial Sequence:  Enzymatic Nucleic Acid
ggcaaagagccgaaaggcgagugaggucucauuuaug

SEQ ID NO: 18225 - RNA, 37 nt, Artificial Sequence
  Description of Artificial Sequence:  Enzymatic Nucleic Acid
auuucagggccgaaaggcgagugaggucuaaagacca

SEQ ID NO: 18226 - RNA, 37 nt, Artificial Sequence
  Description of Artificial Sequence:  Enzymatic Nucleic Acid
cuuacucagccgaaaggcgagugaggucucauuucag

SEQ ID NO: 18227 - RNA, 37 nt, Artificial Sequence
  Description of Artificial Sequence:  Enzymatic Nucleic Acid
uuuccuuagccgaaaggcgagugaggucuucaccauu

SEQ ID NO: 18228 - RNA, 37 nt, Artificial Sequence
  Description of Artificial Sequence:  Enzymatic Nucleic Acid
gccuuucggccgaaaggcgagugaggucuuuuccuua

SEQ ID NO: 18229 - RNA, 37 nt, Artificial Sequence
  Description of Artificial Sequence:  Enzymatic Nucleic Acid
augcucaggccgaaaggcgagugaggucucuuucgcu

SEQ ID NO: 18230 - RNA, 37 nt, Artificial Sequence
  Description of Artificial Sequence:  Enzymatic Nucleic Acid
uaguuauggccgaaaggcgagugaggucuucagccuu

SEQ ID NO: 18231 - RNA, 37 nt, Artificial Sequence
  Description of Artificial Sequence:  Enzymatic Nucleic Acid
uccacagggccgaaaggcgagugaggucuagauuuag

SEQ ID NO: 18232 - RNA, 37 nt, Artificial Sequence
  Description of Artificial Sequence:  Enzymatic Nucleic Acid
uucuuccagccgaaaggcgagugaggucuaggcagau

SEQ ID NO: 18233 - RNA, 37 nt, Artificial Sequence
  Description of Artificial Sequence:  Enzymatic Nucleic Acid
auuguuuggccgaaaggcgagugaggucucauuucuu

SEQ ID NO: 18234 - RNA, 37 nt, Artificial Sequence
  Description of Artificial Sequence:  Enzymatic Nucleic Acid
aaguacuggccgaaaggcgagugaggucuagaauugu

SEQ ID NO: 18235 - RNA, 37 nt, Artificial Sequence
  Description of Artificial Sequence:  Enzymatic Nucleic Acid
uuaaaguagccgaaaggcgagugaggucuugcagaau

SEQ ID NO: 18236 - RNA, 37 nt, Artificial Sequence
  Description of Artificial Sequence:  Enzymatic Nucleic Acid
ugcuugaggccgaaaggcgagugaggucuuguguuca

SEQ ID NO: 18237 - RNA, 37 nt, Artificial Sequence
  Description of Artificial Sequence:  Enzymatic Nucleic Acid
gugguuuggccgaaaggcgagugaggucuuugagcug

SEQ ID NO: 18238 - RNA, 37 nt, Artificial Sequence
  Description of Artificial Sequence:  Enzymatic Nucleic Acid
uguagaaggccgaaaggcgagugaggucucagugugg

SEQ ID NO: 18239 - RNA, 37 nt, Artificial Sequence
  Description of Artificial Sequence:  Enzymatic Nucleic Acid
auuugcaggccgaaaggcgagugaggucuuguagaag

SEQ ID NO: 18240 - RNA, 37 nt, Artificial Sequence
  Description of Artificial Sequence:  Enzymatic Nucleic Acid
gauauuuggccgaaaggcgagugaggucuagcuguag

SEQ ID NO: 18241 - RNA, 37 nt, Artificial Sequence
  Description of Artificial Sequence:  Enzymatic Nucleic Acid
agguacaggccgaaaggcgagugaggucuuagauauu

SEQ ID NO: 18242 - RNA, 37 nt, Artificial Sequence
  Description of Artificial Sequence:  Enzymatic Nucleic Acid
aguagguagccgaaaggcgagugaggucuagcuagau

SEQ ID NO: 18243 - RNA, 37 nt, Artificial Sequence
  Description of Artificial Sequence:  Enzymatic Nucleic Acid
auagauuggccgaaaggcgagugaggucuagauucug

SEQ ID NO: 18244 - RNA, 37 nt, Artificial Sequence
  Description of Artificial Sequence:  Enzymatic Nucleic Acid
cuguaucagccgaaaggcgagugaggucuuaauaaau

SEQ ID NO: 18245 - RNA, 37 nt, Artificial Sequence
  Description of Artificial Sequence:  Enzymatic Nucleic Acid
aaggucuagccgaaaggcgagugaggucucuguauca

SEQ ID NO: 18246 - RNA, 37 nt, Artificial Sequence
  Description of Artificial Sequence:  Enzymatic Nucleic Acid
caucucuagccgaaaggcgagugaggucugaaagguc

SEQ ID NO: 18247 - RNA, 37 nt, Artificial Sequence
  Description of Artificial Sequence:  Enzymatic Nucleic Acid
ucacuguagccgaaaggcgagugaggucuaucucuac

SEQ ID NO: 18248 - RNA, 37 nt, Artificial Sequence
  Description of Artificial Sequence:  Enzymatic Nucleic Acid
ggauuucagccgaaaggcgagugaggucuuguacauc

SEQ ID NO: 18249 - RNA, 37 nt, Artificial Sequence
  Description of Artificial Sequence:  Enzymatic Nucleic Acid
augacgaggccgaaaggcgagugaggucuucccuucc

SEQ ID NO: 18250 - RNA, 37 nt, Artificial Sequence
  Description of Artificial Sequence:  Enzymatic Nucleic Acid
gggaaugagccgaaaggcgagugaggucugagcuccc

SEQ ID NO: 18251 - RNA, 37 nt, Artificial Sequence
  Description of Artificial Sequence:  Enzymatic Nucleic Acid
uaacccgggccgaaaggcgagugaggucuagggaaug

SEQ ID NO: 18252 - RNA, 37 nt, Artificial Sequence
  Description of Artificial Sequence:  Enzymatic Nucleic Acid
ugacguaagccgaaaggcgagugaggucuccggcagg

SEQ ID NO: 18253 - RNA, 37 nt, Artificial Sequence
  Description of Artificial Sequence:  Enzymatic Nucleic Acid
uuaggugagccgaaaggcgagugaggucuguaacccg

SEQ ID NO: 18254 - RNA, 37 nt, Artificial Sequence
  Description of Artificial Sequence:  Enzymatic Nucleic Acid
uaaaguaagccgaaaggcgagugaggucuagugaugu

SEQ ID NO: 18255 - RNA, 37 nt, Artificial Sequence
  Description of Artificial Sequence:  Enzymatic Nucleic Acid
aguggaaagccgaaaggcgagugaggucuuuuuuuaa

SEQ ID NO: 18256 - RNA, 37 nt, Artificial Sequence
  Description of Artificial Sequence:  Enzymatic Nucleic Acid
agauuauggccgaaaggcgagugaggucuguuuucca

SEQ ID NO: 18257 - RNA, 37 nt, Artificial Sequence
  Description of Artificial Sequence:  Enzymatic Nucleic Acid
ccuuucuagccgaaaggcgagugaggucuugucccag

SEQ ID NO: 18258 - RNA, 37 nt, Artificial Sequence
  Description of Artificial Sequence:  Enzymatic Nucleic Acid
ugaugaaggccgaaaggcgagugaggucuccuuucua

SEQ ID NO: 18259 - RNA, 37 nt, Artificial Sequence
  Description of Artificial Sequence:  Enzymatic Nucleic Acid
guacguuggccgaaaggcgagugaggucuauuugaua

SEQ ID NO: 18260 - RNA, 37 nt, Artificial Sequence
  Description of Artificial Sequence:  Enzymatic Nucleic Acid
ucuuuguagccgaaaggcgagugaggucuguugcauu

SEQ ID NO: 18261 - RNA, 37 nt, Artificial Sequence
  Description of Artificial Sequence:  Enzymatic Nucleic Acid
gucagaaggccgaaaggcgagugaggucuccuauuuc

SEQ ID NO: 18262 - RNA, 37 nt, Artificial Sequence
  Description of Artificial Sequence:  Enzymatic Nucleic Acid
uugcuucagccgaaaggcgagugaggucuaggucaga

SEQ ID NO: 18263 - RNA, 37 nt, Artificial Sequence
  Description of Artificial Sequence:  Enzymatic Nucleic Acid
gacuguuggccgaaaggcgagugaggucuuucacagg

SEQ ID NO: 18264 - RNA, 37 nt, Artificial Sequence
  Description of Artificial Sequence:  Enzymatic Nucleic Acid
cccauugagccgaaaggcgagugaggucuuguugcuu

SEQ ID NO: 18265 - RNA, 37 nt, Artificial Sequence
  Description of Artificial Sequence:  Enzymatic Nucleic Acid
uacaaauggccgaaaggcgagugaggucuccauugac

SEQ ID NO: 18266 - RNA, 37 nt, Artificial Sequence
  Description of Artificial Sequence:  Enzymatic Nucleic Acid
gucuuauagccgaaaggcgagugaggucuaaaugccc

SEQ ID NO: 18267 - RNA, 37 nt, Artificial Sequence
  Description of Artificial Sequence:  Enzymatic Nucleic Acid
uauuuggagccgaaaggcgagugaggucuaucuauga

SEQ ID NO: 18268 - RNA, 37 nt, Artificial Sequence
  Description of Artificial Sequence:  Enzymatic Nucleic Acid
gugguguggccgaaaggcgagugaggucuuuauuugg

SEQ ID NO: 18269 - RNA, 37 nt, Artificial Sequence
  Description of Artificial Sequence:  Enzymatic Nucleic Acid
ugacuggggccgaaaggcgagugaggucuguggugug

SEQ ID NO: 18270 - RNA, 37 nt, Artificial Sequence
  Description of Artificial Sequence:  Enzymatic Nucleic Acid
uaauuugagccgaaaggcgagugaggucuugggcgug

SEQ ID NO: 18271 - RNA, 37 nt, Artificial Sequence
  Description of Artificial Sequence:  Enzymatic Nucleic Acid
gaguaugggccgaaaggcgagugaggucucucuaagu

SEQ ID NO: 18272 - RNA, 37 nt, Artificial Sequence
  Description of Artificial Sequence:  Enzymatic Nucleic Acid
auugaggagccgaaaggcgagugaggucuaagaguau

SEQ ID NO: 18273 - RNA, 37 nt, Artificial Sequence
  Description of Artificial Sequence:  Enzymatic Nucleic Acid
uagcaguagccgaaaggcgagugaggucuaauugagg

SEQ ID NO: 18274 - RNA, 37 nt, Artificial Sequence
  Description of Artificial Sequence:  Enzymatic Nucleic Acid
agugguaggccgaaaggcgagugaggucuaguacaau

SEQ ID NO: 18275 - RNA, 37 nt, Artificial Sequence
  Description of Artificial Sequence:  Enzymatic Nucleic Acid
cauuugaagccgaaaggcgagugaggucuucucgugu

SEQ ID NO: 18276 - RNA, 37 nt, Artificial Sequence
  Description of Artificial Sequence:  Enzymatic Nucleic Acid
caggguaagccgaaaggcgagugaggucuuccagguc

SEQ ID NO: 18277 - RNA, 37 nt, Artificial Sequence
  Description of Artificial Sequence:  Enzymatic Nucleic Acid
uacggaaggccgaaaggcgagugaggucuucucuuau

SEQ ID NO: 18278 - RNA, 37 nt, Artificial Sequence
  Description of Artificial Sequence:  Enzymatic Nucleic Acid
ucgccuuagccgaaaggcgagugaggucuggaagcuc

SEQ ID NO: 18279 - RNA, 37 nt, Artificial Sequence
  Description of Artificial Sequence:  Enzymatic Nucleic Acid
auucgucggccgaaaggcgagugaggucucuuacgga

SEQ ID NO: 18280 - RNA, 37 nt, Artificial Sequence
  Description of Artificial Sequence:  Enzymatic Nucleic Acid
gggaauuggccgaaaggcgagugaggucuuuugguca

SEQ ID NO: 18281 - RNA, 37 nt, Artificial Sequence
  Description of Artificial Sequence:  Enzymatic Nucleic Acid
uauguugggccgaaaggcgagugaggucuaugggaau

SEQ ID NO: 18282 - RNA, 37 nt, Artificial Sequence
  Description of Artificial Sequence:  Enzymatic Nucleic Acid
uaagaacagccgaaaggcgagugaggucuuguagaau

SEQ ID NO: 18283 - RNA, 37 nt, Artificial Sequence
  Description of Artificial Sequence:  Enzymatic Nucleic Acid
aguaagaagccgaaaggcgagugaggucuacuguaga

SEQ ID NO: 18284 - RNA, 37 nt, Artificial Sequence
  Description of Artificial Sequence:  Enzymatic Nucleic Acid
uuguucuggccgaaaggcgagugaggucuauuuuguc

SEQ ID NO: 18285 - RNA, 37 nt, Artificial Sequence
  Description of Artificial Sequence:  Enzymatic Nucleic Acid
uuacacgagccgaaaggcgagugaggucuaaguauaa

SEQ ID NO: 18286 - RNA, 37 nt, Artificial Sequence
  Description of Artificial Sequence:  Enzymatic Nucleic Acid
uccuuacagccgaaaggcgagugaggucugacaagua

SEQ ID NO: 18287 - RNA, 37 nt, Artificial Sequence
  Description of Artificial Sequence:  Enzymatic Nucleic Acid
acuccuuagccgaaaggcgagugaggucuacgacaag

SEQ ID NO: 18288 - RNA, 37 nt, Artificial Sequence
  Description of Artificial Sequence:  Enzymatic Nucleic Acid
augguccagccgaaaggcgagugaggucuuccuuaca

SEQ ID NO: 18289 - RNA, 37 nt, Artificial Sequence
  Description of Artificial Sequence:  Enzymatic Nucleic Acid
gguguuaagccgaaaggcgagugaggucuagauuuga

SEQ ID NO: 18290 - RNA, 37 nt, Artificial Sequence
  Description of Artificial Sequence:  Enzymatic Nucleic Acid
uauaugcagccgaaaggcgagugaggucuugaggugu

SEQ ID NO: 18291 - RNA, 37 nt, Artificial Sequence
  Description of Artificial Sequence:  Enzymatic Nucleic Acid
uauauauggccgaaaggcgagugaggucuacugaggu

SEQ ID NO: 18292 - RNA, 37 nt, Artificial Sequence
  Description of Artificial Sequence:  Enzymatic Nucleic Acid
gaugaauggccgaaaggcgagugaggucuuuuaucau

SEQ ID NO: 18293 - RNA, 37 nt, Artificial Sequence
  Description of Artificial Sequence:  Enzymatic Nucleic Acid
auguuucagccgaaaggcgagugaggucuagugauga

SEQ ID NO: 18294 - RNA, 37 nt, Artificial Sequence
  Description of Artificial Sequence:  Enzymatic Nucleic Acid
agcaccuggccgaaaggcgagugaggucuuguuuucg

SEQ ID NO: 18295 - RNA, 37 nt, Artificial Sequence
  Description of Artificial Sequence:  Enzymatic Nucleic Acid
uucaagcagccgaaaggcgagugaggucucugcuguu

SEQ ID NO: 18296 - RNA, 37 nt, Artificial Sequence
  Description of Artificial Sequence:  Enzymatic Nucleic Acid
guuucaaggccgaaaggcgagugaggucuaccugcug

SEQ ID NO: 18297 - RNA, 37 nt, Artificial Sequence
  Description of Artificial Sequence:  Enzymatic Nucleic Acid
gccagcuagccgaaaggcgagugaggucugguuucaa

SEQ ID NO: 18298 - RNA, 37 nt, Artificial Sequence
  Description of Artificial Sequence:  Enzymatic Nucleic Acid
cuugccaggccgaaaggcgagugaggucuuacgguuu

SEQ ID NO: 18299 - RNA, 37 nt, Artificial Sequence
  Description of Artificial Sequence:  Enzymatic Nucleic Acid
accgcuuggccgaaaggcgagugaggucucagcuacg

SEQ ID NO: 18300 - RNA, 37 nt, Artificial Sequence
  Description of Artificial Sequence:  Enzymatic Nucleic Acid
uaagaccggccgaaaggcgagugaggucuuugccagc

SEQ ID NO: 18301 - RNA, 37 nt, Artificial Sequence
  Description of Artificial Sequence:  Enzymatic Nucleic Acid
cgguaagagccgaaaggcgagugaggucucgcuugcc

SEQ ID NO: 18302 - RNA, 37 nt, Artificial Sequence
  Description of Artificial Sequence:  Enzymatic Nucleic Acid
auagagaggccgaaaggcgagugaggucucgguaaga

SEQ ID NO: 18303 - RNA, 37 nt, Artificial Sequence
  Description of Artificial Sequence:  Enzymatic Nucleic Acid
ugccuucagccgaaaggcgagugaggucuuuucauag

SEQ ID NO: 18304 - RNA, 37 nt, Artificial Sequence
  Description of Artificial Sequence:  Enzymatic Nucleic Acid
gggaaauggccgaaaggcgagugaggucucuucacuu

SEQ ID NO: 18305 - RNA, 37 nt, Artificial Sequence
  Description of Artificial Sequence:  Enzymatic Nucleic Acid
acuuccgggccgaaaggcgagugaggucugagggaaa

SEQ ID NO: 18306 - RNA, 37 nt, Artificial Sequence
  Description of Artificial Sequence:  Enzymatic Nucleic Acid
ccauacaagccgaaaggcgagugaggucuuuccggcg

SEQ ID NO: 18307 - RNA, 37 nt, Artificial Sequence
  Description of Artificial Sequence:  Enzymatic Nucleic Acid
uaaccauagccgaaaggcgagugaggucuaacuuccg

SEQ ID NO: 18308 - RNA, 37 nt, Artificial Sequence
  Description of Artificial Sequence:  Enzymatic Nucleic Acid
ucuuuuaagccgaaaggcgagugaggucucauacaac

SEQ ID NO: 18309 - RNA, 37 nt, Artificial Sequence
  Description of Artificial Sequence:  Enzymatic Nucleic Acid
gcagguaagccgaaaggcgagugaggucuccaucuuu

SEQ ID NO: 18310 - RNA, 37 nt, Artificial Sequence
  Description of Artificial Sequence:  Enzymatic Nucleic Acid
cucagucggccgaaaggcgagugaggucuagguaacc

SEQ ID NO: 18311 - RNA, 37 nt, Artificial Sequence
  Description of Artificial Sequence:  Enzymatic Nucleic Acid
auagcgaggccgaaaggcgagugaggucuagauuucu

SEQ ID NO: 18312 - RNA, 37 nt, Artificial Sequence
  Description of Artificial Sequence:  Enzymatic Nucleic Acid
ucaaauaggccgaaaggcgagugaggucugagcagau

SEQ ID NO: 18313 - RNA, 37 nt, Artificial Sequence
  Description of Artificial Sequence:  Enzymatic Nucleic Acid
aguagccagccgaaaggcgagugaggucugagucaaa

SEQ ID NO: 18314 - RNA, 37 nt, Artificial Sequence
  Description of Artificial Sequence:  Enzymatic Nucleic Acid
acgaguaggccgaaaggcgagugaggucucacgaguc

SEQ ID NO: 18315 - RNA, 37 nt, Artificial Sequence
  Description of Artificial Sequence:  Enzymatic Nucleic Acid
auaauuaagccgaaaggcgagugaggucugaguagcc

SEQ ID NO: 18316 - RNA, 37 nt, Artificial Sequence
  Description of Artificial Sequence:  Enzymatic Nucleic Acid
uucaguuagccgaaaggcgagugaggucuguccuuga

SEQ ID NO: 18317 - RNA, 37 nt, Artificial Sequence
  Description of Artificial Sequence:  Enzymatic Nucleic Acid
auucccuggccgaaaggcgagugaggucuauccucuu

SEQ ID NO: 18318 - RNA, 37 nt, Artificial Sequence
  Description of Artificial Sequence:  Enzymatic Nucleic Acid
augcucaggccgaaaggcgagugaggucuaagauugu

SEQ ID NO: 18319 - RNA, 37 nt, Artificial Sequence
  Description of Artificial Sequence:  Enzymatic Nucleic Acid
guuuuauggccgaaaggcgagugaggucuucagcaag

SEQ ID NO: 18320 - RNA, 37 nt, Artificial Sequence
  Description of Artificial Sequence:  Enzymatic Nucleic Acid
acauuugagccgaaaggcgagugaggucuuguuuuau

SEQ ID NO: 18321 - RNA, 37 nt, Artificial Sequence
  Description of Artificial Sequence:  Enzymatic Nucleic Acid
uuuaaacagccgaaaggcgagugaggucuauuugacu

SEQ ID NO: 18322 - RNA, 37 nt, Artificial Sequence
  Description of Artificial Sequence:  Enzymatic Nucleic Acid
uuuuuaaagccgaaaggcgagugaggucuacauuuga

SEQ ID NO: 18323 - RNA, 37 nt, Artificial Sequence
  Description of Artificial Sequence:  Enzymatic Nucleic Acid
uagagugggccgaaaggcgagugaggucuagugaggu

SEQ ID NO: 18324 - RNA, 37 nt, Artificial Sequence
  Description of Artificial Sequence:  Enzymatic Nucleic Acid
cacauugagccgaaaggcgagugaggucuaauuagag

SEQ ID NO: 18325 - RNA, 37 nt, Artificial Sequence
  Description of Artificial Sequence:  Enzymatic Nucleic Acid
ggguuucagccgaaaggcgagugaggucuauugacaa

SEQ ID NO: 18326 - RNA, 37 nt, Artificial Sequence
  Description of Artificial Sequence:  Enzymatic Nucleic Acid
ugacacgggccgaaaggcgagugaggucucuuuucgu

SEQ ID NO: 18327 - RNA, 37 nt, Artificial Sequence
  Description of Artificial Sequence:  Enzymatic Nucleic Acid
cgaugacagccgaaaggcgagugaggucuggccuuuu

SEQ ID NO: 18328 - RNA, 37 nt, Artificial Sequence
  Description of Artificial Sequence:  Enzymatic Nucleic Acid
aacgaugagccgaaaggcgagugaggucuacggccuu

SEQ ID NO: 18329 - RNA, 37 nt, Artificial Sequence
  Description of Artificial Sequence:  Enzymatic Nucleic Acid
ucuggaaagccgaaaggcgagugaggucugaugacac

SEQ ID NO: 18330 - RNA, 37 nt, Artificial Sequence
  Description of Artificial Sequence:  Enzymatic Nucleic Acid
guagagaggccgaaaggcgagugaggucucgggucug

SEQ ID NO: 18331 - RNA, 37 nt, Artificial Sequence
  Description of Artificial Sequence:  Enzymatic Nucleic Acid
gucugcuggccgaaaggcgagugaggucuccaguggg

SEQ ID NO: 18332 - RNA, 37 nt, Artificial Sequence
  Description of Artificial Sequence:  Enzymatic Nucleic Acid
uuugucuggccgaaaggcgagugaggucuugcccagu

SEQ ID NO: 18333 - RNA, 37 nt, Artificial Sequence
  Description of Artificial Sequence:  Enzymatic Nucleic Acid
augcgguagccgaaaggcgagugaggucuaagucagg

SEQ ID NO: 18334 - RNA, 37 nt, Artificial Sequence
  Description of Artificial Sequence:  Enzymatic Nucleic Acid
accauauggccgaaaggcgagugaggucugguacaag

SEQ ID NO: 18335 - RNA, 37 nt, Artificial Sequence
  Description of Artificial Sequence:  Enzymatic Nucleic Acid
gagggauagccgaaaggcgagugaggucucauaugcg

SEQ ID NO: 18336 - RNA, 37 nt, Artificial Sequence
  Description of Artificial Sequence:  Enzymatic Nucleic Acid
cagaaccagccgaaaggcgagugaggucuuugauugu

SEQ ID NO: 18337 - RNA, 37 nt, Artificial Sequence
  Description of Artificial Sequence:  Enzymatic Nucleic Acid
ugccagaagccgaaaggcgagugaggucucacuugau

SEQ ID NO: 18338 - RNA, 37 nt, Artificial Sequence
  Description of Artificial Sequence:  Enzymatic Nucleic Acid
cagggguggccgaaaggcgagugaggucucagaacca

SEQ ID NO: 18339 - RNA, 37 nt, Artificial Sequence
  Description of Artificial Sequence:  Enzymatic Nucleic Acid
uaugguuagccgaaaggcgagugaggucuaggggugc

SEQ ID NO: 18340 - RNA, 37 nt, Artificial Sequence
  Description of Artificial Sequence:  Enzymatic Nucleic Acid
acaccuuggccgaaaggcgagugaggucuuucggaau

SEQ ID NO: 18341 - RNA, 37 nt, Artificial Sequence
  Description of Artificial Sequence:  Enzymatic Nucleic Acid
aagucacagccgaaaggcgagugaggucucuugcuuc

SEQ ID NO: 18342 - RNA, 37 nt, Artificial Sequence
  Description of Artificial Sequence:  Enzymatic Nucleic Acid
aaaagucagccgaaaggcgagugaggucuaccuugcu

SEQ ID NO: 18343 - RNA, 37 nt, Artificial Sequence
  Description of Artificial Sequence:  Enzymatic Nucleic Acid
uauuggaagccgaaaggcgagugaggucuaaaaguca

SEQ ID NO: 18344 - RNA, 37 nt, Artificial Sequence
  Description of Artificial Sequence:  Enzymatic Nucleic Acid
auaaaggagccgaaaggcgagugaggucuucuucauu

SEQ ID NO: 18345 - RNA, 37 nt, Artificial Sequence
  Description of Artificial Sequence:  Enzymatic Nucleic Acid
gcugucaggccgaaaggcgagugaggucuauccagga

SEQ ID NO: 18346 - RNA, 37 nt, Artificial Sequence
  Description of Artificial Sequence:  Enzymatic Nucleic Acid
ccauguuggccgaaaggcgagugaggucuugucagca

SEQ ID NO: 18347 - RNA, 37 nt, Artificial Sequence
  Description of Artificial Sequence:  Enzymatic Nucleic Acid
gagugauggccgaaaggcgagugaggucuucucaauu

SEQ ID NO: 18348 - RNA, 37 nt, Artificial Sequence
  Description of Artificial Sequence:  Enzymatic Nucleic Acid
gccaugcggccgaaaggcgagugaggucuugagugau

SEQ ID NO: 18349 - RNA, 37 nt, Artificial Sequence
  Description of Artificial Sequence:  Enzymatic Nucleic Acid
uugccauggccgaaaggcgagugaggucugcugagug

SEQ ID NO: 18350 - RNA, 37 nt, Artificial Sequence
  Description of Artificial Sequence:  Enzymatic Nucleic Acid
uauuauuggccgaaaggcgagugaggucucaugcgcu

SEQ ID NO: 18351 - RNA, 37 nt, Artificial Sequence
  Description of Artificial Sequence:  Enzymatic Nucleic Acid
ggugcuaggccgaaaggcgagugaggucucaucuuau

SEQ ID NO: 18352 - RNA, 37 nt, Artificial Sequence
  Description of Artificial Sequence:  Enzymatic Nucleic Acid
ccaagguggccgaaaggcgagugaggucuuagccauc

SEQ ID NO: 18353 - RNA, 37 nt, Artificial Sequence
  Description of Artificial Sequence:  Enzymatic Nucleic Acid
agccacaagccgaaaggcgagugaggucucaaggugc

SEQ ID NO: 18354 - RNA, 37 nt, Artificial Sequence
  Description of Artificial Sequence:  Enzymatic Nucleic Acid
gucagccagccgaaaggcgagugaggucuaaccaagg

SEQ ID NO: 18355 - RNA, 37 nt, Artificial Sequence
  Description of Artificial Sequence:  Enzymatic Nucleic Acid
agagucaggccgaaaggcgagugaggucucacaacca

SEQ ID NO: 18356 - RNA, 37 nt, Artificial Sequence
  Description of Artificial Sequence:  Enzymatic Nucleic Acid
aagcuauggccgaaaggcgagugaggucuaaauguag

SEQ ID NO: 18357 - RNA, 37 nt, Artificial Sequence
  Description of Artificial Sequence:  Enzymatic Nucleic Acid
auuggaaggccgaaaggcgagugaggucuuaugcaaa

SEQ ID NO: 18358 - RNA, 37 nt, Artificial Sequence
  Description of Artificial Sequence:  Enzymatic Nucleic Acid
agucccaagccgaaaggcgagugaggucuuuuauugg

SEQ ID NO: 18359 - RNA, 37 nt, Artificial Sequence
  Description of Artificial Sequence:  Enzymatic Nucleic Acid
ucuucccagccgaaaggcgagugaggucuagucccaa

SEQ ID NO: 18360 - RNA, 37 nt, Artificial Sequence
  Description of Artificial Sequence:  Enzymatic Nucleic Acid
uauaaaaggccgaaaggcgagugaggucuuuauguuu

SEQ ID NO: 18361 - RNA, 37 nt, Artificial Sequence
  Description of Artificial Sequence:  Enzymatic Nucleic Acid
auuuggcagccgaaaggcgagugaggucuaucuguga

SEQ ID NO: 18362 - RNA, 37 nt, Artificial Sequence
  Description of Artificial Sequence:  Enzymatic Nucleic Acid
ccauuugggccgaaaggcgagugaggucuacaucugu

SEQ ID NO: 18363 - RNA, 37 nt, Artificial Sequence
  Description of Artificial Sequence:  Enzymatic Nucleic Acid
acaugaaagccgaaaggcgagugaggucuccauuugg

SEQ ID NO: 18364 - RNA, 37 nt, Artificial Sequence
  Description of Artificial Sequence:  Enzymatic Nucleic Acid
caaguuaagccgaaaggcgagugaggucuaugaaacc

SEQ ID NO: 18365 - RNA, 37 nt, Artificial Sequence
  Description of Artificial Sequence:  Enzymatic Nucleic Acid
uccgucgggccgaaaggcgagugaggucuauuuuuuc

SEQ ID NO: 18366 - RNA, 37 nt, Artificial Sequence
  Description of Artificial Sequence:  Enzymatic Nucleic Acid
gugcaagagccgaaaggcgagugaggucuaguuucag

SEQ ID NO: 18367 - RNA, 37 nt, Artificial Sequence
  Description of Artificial Sequence:  Enzymatic Nucleic Acid
uaacuguggccgaaaggcgagugaggucuaagacagu

SEQ ID NO: 18368 - RNA, 37 nt, Artificial Sequence
  Description of Artificial Sequence:  Enzymatic Nucleic Acid
cuuguuaagccgaaaggcgagugaggucuugugcaag

SEQ ID NO: 18369 - RNA, 37 nt, Artificial Sequence
  Description of Artificial Sequence:  Enzymatic Nucleic Acid
uauaagaagccgaaaggcgagugaggucuuuguuaac

SEQ ID NO: 18370 - RNA, 37 nt, Artificial Sequence
  Description of Artificial Sequence:  Enzymatic Nucleic Acid
ccaaguaagccgaaaggcgagugaggucugucucugu

SEQ ID NO: 18371 - RNA, 37 nt, Artificial Sequence
  Description of Artificial Sequence:  Enzymatic Nucleic Acid
acuguccggccgaaaggcgagugaggucuaguaaaau

SEQ ID NO: 18372 - RNA, 37 nt, Artificial Sequence
  Description of Artificial Sequence:  Enzymatic Nucleic Acid
guuauuaagccgaaaggcgagugaggucuuguccgca

SEQ ID NO: 18373 - RNA, 37 nt, Artificial Sequence
  Description of Artificial Sequence:  Enzymatic Nucleic Acid
cuguaguggccgaaaggcgagugaggucuauuguucu

SEQ ID NO: 18374 - RNA, 37 nt, Artificial Sequence
  Description of Artificial Sequence:  Enzymatic Nucleic Acid
ugcuaauagccgaaaggcgagugaggucuuguagugc

SEQ ID NO: 18375 - RNA, 37 nt, Artificial Sequence
  Description of Artificial Sequence:  Enzymatic Nucleic Acid
uuugcuuggccgaaaggcgagugaggucuuaauacug

SEQ ID NO: 18376 - RNA, 37 nt, Artificial Sequence
  Description of Artificial Sequence:  Enzymatic Nucleic Acid
auuuuuuggccgaaaggcgagugaggucuuugcuaau

SEQ ID NO: 18377 - RNA, 37 nt, Artificial Sequence
  Description of Artificial Sequence:  Enzymatic Nucleic Acid
agugaugggccgaaaggcgagugaggucucauuuuuu

SEQ ID NO: 18378 - RNA, 37 nt, Artificial Sequence
  Description of Artificial Sequence:  Enzymatic Nucleic Acid
auggaguggccgaaaggcgagugaggucuuccuuagu

SEQ ID NO: 18379 - RNA, 37 nt, Artificial Sequence
  Description of Artificial Sequence:  Enzymatic Nucleic Acid
cagggaaagccgaaaggcgagugaggucuauucauga

SEQ ID NO: 18380 - RNA, 37 nt, Artificial Sequence
  Description of Artificial Sequence:  Enzymatic Nucleic Acid
gaaucuuggccgaaaggcgagugaggucuagggaaac

SEQ ID NO: 18381 - RNA, 37 nt, Artificial Sequence
  Description of Artificial Sequence:  Enzymatic Nucleic Acid
cauagguggccgaaaggcgagugaggucucugaaucu

SEQ ID NO: 18382 - RNA, 37 nt, Artificial Sequence
  Description of Artificial Sequence:  Enzymatic Nucleic Acid
ucugcagggccgaaaggcgagugaggucuauaggugc

SEQ ID NO: 18383 - RNA, 37 nt, Artificial Sequence
  Description of Artificial Sequence:  Enzymatic Nucleic Acid
uggcucuggccgaaaggcgagugaggucuaggcauag

SEQ ID NO: 18384 - RNA, 37 nt, Artificial Sequence
  Description of Artificial Sequence:  Enzymatic Nucleic Acid
auuccugggccgaaaggcgagugaggucuucugcagg

SEQ ID NO: 18385 - RNA, 37 nt, Artificial Sequence
  Description of Artificial Sequence:  Enzymatic Nucleic Acid
uguguauagccgaaaggcgagugaggucuauuccugg

SEQ ID NO: 18386 - RNA, 37 nt, Artificial Sequence
  Description of Artificial Sequence:  Enzymatic Nucleic Acid
guaugguggccgaaaggcgagugaggucuuuccugau

SEQ ID NO: 18387 - RNA, 37 nt, Artificial Sequence
  Description of Artificial Sequence:  Enzymatic Nucleic Acid
agguuucggccgaaaggcgagugaggucuaggaggua

SEQ ID NO: 18388 - RNA, 37 nt, Artificial Sequence
  Description of Artificial Sequence:  Enzymatic Nucleic Acid
ugugaucagccgaaaggcgagugaggucuugagguuu

SEQ ID NO: 18389 - RNA, 37 nt, Artificial Sequence
  Description of Artificial Sequence:  Enzymatic Nucleic Acid
gauggccagccgaaaggcgagugaggucuugugugau

SEQ ID NO: 18390 - RNA, 37 nt, Artificial Sequence
  Description of Artificial Sequence:  Enzymatic Nucleic Acid
gcugaugggccgaaaggcgagugaggucucacugugu

SEQ ID NO: 18391 - RNA, 37 nt, Artificial Sequence
  Description of Artificial Sequence:  Enzymatic Nucleic Acid
uggaacuggccgaaaggcgagugaggucuugauggcc

SEQ ID NO: 18392 - RNA, 37 nt, Artificial Sequence
  Description of Artificial Sequence:  Enzymatic Nucleic Acid
ugguggaagccgaaaggcgagugaggucuugcugaug

SEQ ID NO: 18393 - RNA, 37 nt, Artificial Sequence
  Description of Artificial Sequence:  Enzymatic Nucleic Acid
uagcaugagccgaaaggcgagugaggucuagucuaaa

SEQ ID NO: 18394 - RNA, 37 nt, Artificial Sequence
  Description of Artificial Sequence:  Enzymatic Nucleic Acid
accauuaggccgaaaggcgagugaggucuaugacagu

SEQ ID NO: 18395 - RNA, 37 nt, Artificial Sequence
  Description of Artificial Sequence:  Enzymatic Nucleic Acid
cggggacagccgaaaggcgagugaggucucauuagca

SEQ ID NO: 18396 - RNA, 37 nt, Artificial Sequence
  Description of Artificial Sequence:  Enzymatic Nucleic Acid
cucggggagccgaaaggcgagugaggucuaccauuag

SEQ ID NO: 18397 - RNA, 37 nt, Artificial Sequence
  Description of Artificial Sequence:  Enzymatic Nucleic Acid
aucugagggccgaaaggcgagugaggucuucggggac

SEQ ID NO: 18398 - RNA, 37 nt, Artificial Sequence
  Description of Artificial Sequence:  Enzymatic Nucleic Acid
uuuuuaaagccgaaaggcgagugaggucucaagugau

SEQ ID NO: 18399 - RNA, 37 nt, Artificial Sequence
  Description of Artificial Sequence:  Enzymatic Nucleic Acid
auuccagggccgaaaggcgagugaggucuucuuguug

SEQ ID NO: 18400 - RNA, 37 nt, Artificial Sequence
  Description of Artificial Sequence:  Enzymatic Nucleic Acid
gcgugcuggccgaaaggcgagugaggucuuuccuggu

SEQ ID NO: 18401 - RNA, 37 nt, Artificial Sequence
  Description of Artificial Sequence:  Enzymatic Nucleic Acid
acagcguggccgaaaggcgagugaggucuugcuuccu

SEQ ID NO: 18402 - RNA, 37 nt, Artificial Sequence
  Description of Artificial Sequence:  Enzymatic Nucleic Acid
auaaacaggccgaaaggcgagugaggucugugcugcu

SEQ ID NO: 18403 - RNA, 37 nt, Artificial Sequence
  Description of Artificial Sequence:  Enzymatic Nucleic Acid
ucaauaaagccgaaaggcgagugaggucuagcgugcu

SEQ ID NO: 18404 - RNA, 37 nt, Artificial Sequence
  Description of Artificial Sequence:  Enzymatic Nucleic Acid
uucugugagccgaaaggcgagugaggucuucuuucaa

SEQ ID NO: 18405 - RNA, 37 nt, Artificial Sequence
  Description of Artificial Sequence:  Enzymatic Nucleic Acid
gauagacagccgaaaggcgagugaggucucuucaucc

SEQ ID NO: 18406 - RNA, 37 nt, Artificial Sequence
  Description of Artificial Sequence:  Enzymatic Nucleic Acid
gugauagagccgaaaggcgagugaggucuaccuucau

SEQ ID NO: 18407 - RNA, 37 nt, Artificial Sequence
  Description of Artificial Sequence:  Enzymatic Nucleic Acid
uggcuuuggccgaaaggcgagugaggucuagugauag

SEQ ID NO: 18408 - RNA, 37 nt, Artificial Sequence
  Description of Artificial Sequence:  Enzymatic Nucleic Acid
guuggugggccgaaaggcgagugaggucuuuugcagu

SEQ ID NO: 18409 - RNA, 37 nt, Artificial Sequence
  Description of Artificial Sequence:  Enzymatic Nucleic Acid
ccacagaggccgaaaggcgagugaggucuccuucugg

SEQ ID NO: 18410 - RNA, 37 nt, Artificial Sequence
  Description of Artificial Sequence:  Enzymatic Nucleic Acid
acuuuccagccgaaaggcgagugaggucuagagcccu

SEQ ID NO: 18411 - RNA, 37 nt, Artificial Sequence
  Description of Artificial Sequence:  Enzymatic Nucleic Acid
augcugaagccgaaaggcgagugaggucuuuuccaca

SEQ ID NO: 18412 - RNA, 37 nt, Artificial Sequence
  Description of Artificial Sequence:  Enzymatic Nucleic Acid
gagguauggccgaaaggcgagugaggucuugaacuuu

SEQ ID NO: 18413 - RNA, 37 nt, Artificial Sequence
  Description of Artificial Sequence:  Enzymatic Nucleic Acid
uccuugaagccgaaaggcgagugaggucuagugaggu

SEQ ID NO: 18414 - RNA, 37 nt, Artificial Sequence
  Description of Artificial Sequence:  Enzymatic Nucleic Acid
agauuagagccgaaaggcgagugaggucuuuguccga

SEQ ID NO: 18415 - RNA, 37 nt, Artificial Sequence
  Description of Artificial Sequence:  Enzymatic Nucleic Acid
gugaucaggccgaaaggcgagugaggucuuccagauu

SEQ ID NO: 18416 - RNA, 37 nt, Artificial Sequence
  Description of Artificial Sequence:  Enzymatic Nucleic Acid
cacagguggccgaaaggcgagugaggucuauguuaga

SEQ ID NO: 18417 - RNA, 37 nt, Artificial Sequence
  Description of Artificial Sequence:  Enzymatic Nucleic Acid
cagccacagccgaaaggcgagugaggucuaggugcau

SEQ ID NO: 18418 - RNA, 37 nt, Artificial Sequence
  Description of Artificial Sequence:  Enzymatic Nucleic Acid
cgcagccagccgaaaggcgagugaggucuacaggugc

SEQ ID NO: 18419 - RNA, 37 nt, Artificial Sequence
  Description of Artificial Sequence:  Enzymatic Nucleic Acid
agucgcaggccgaaaggcgagugaggucucacacagg

SEQ ID NO: 18420 - RNA, 37 nt, Artificial Sequence
  Description of Artificial Sequence:  Enzymatic Nucleic Acid
gagagucggccgaaaggcgagugaggucuagccacac

SEQ ID NO: 18421 - RNA, 37 nt, Artificial Sequence
  Description of Artificial Sequence:  Enzymatic Nucleic Acid
aauaggaggccgaaaggcgagugaggucucagaagag

SEQ ID NO: 18422 - RNA, 37 nt, Artificial Sequence
  Description of Artificial Sequence:  Enzymatic Nucleic Acid
gaagaagagccgaaaggcgagugaggucucuuuucau

SEQ ID NO: 18423 - RNA, 37 nt, Artificial Sequence
  Description of Artificial Sequence:  Enzymatic Nucleic Acid
caaaggaagccgaaaggcgagugaggucuuucaucug

SEQ ID NO: 18424 - RNA, 37 nt, Artificial Sequence
  Description of Artificial Sequence:  Enzymatic Nucleic Acid
ucacacuggccgaaaggcgagugaggucuucauccaa

SEQ ID NO: 18425 - RNA, 37 nt, Artificial Sequence
  Description of Artificial Sequence:  Enzymatic Nucleic Acid
cgcucacagccgaaaggcgagugaggucuugcucauc

SEQ ID NO: 18426 - RNA, 37 nt, Artificial Sequence
  Description of Artificial Sequence:  Enzymatic Nucleic Acid
gccgcucagccgaaaggcgagugaggucuacugcuca

SEQ ID NO: 18427 - RNA, 37 nt, Artificial Sequence
  Description of Artificial Sequence:  Enzymatic Nucleic Acid
gggagccggccgaaaggcgagugaggucuucacacug

SEQ ID NO: 18428 - RNA, 37 nt, Artificial Sequence
  Description of Artificial Sequence:  Enzymatic Nucleic Acid
uaagggaggccgaaaggcgagugaggucucgcucaca

SEQ ID NO: 18429 - RNA, 37 nt, Artificial Sequence
  Description of Artificial Sequence:  Enzymatic Nucleic Acid
cuugcugggccgaaaggcgagugaggucuaucauaag

SEQ ID NO: 18430 - RNA, 37 nt, Artificial Sequence
  Description of Artificial Sequence:  Enzymatic Nucleic Acid
cccacuuggccgaaaggcgagugaggucuuggcauca

SEQ ID NO: 18431 - RNA, 37 nt, Artificial Sequence
  Description of Artificial Sequence:  Enzymatic Nucleic Acid
aacucccagccgaaaggcgagugaggucuuugcuggc

SEQ ID NO: 18432 - RNA, 37 nt, Artificial Sequence
  Description of Artificial Sequence:  Enzymatic Nucleic Acid
cgggcaaagccgaaaggcgagugaggucuucccacuu

SEQ ID NO: 18433 - RNA, 37 nt, Artificial Sequence
  Description of Artificial Sequence:  Enzymatic Nucleic Acid
cucccggggccgaaaggcgagugaggucuaaacuccc

SEQ ID NO: 18434 - RNA, 37 nt, Artificial Sequence
  Description of Artificial Sequence:  Enzymatic Nucleic Acid
gugauuuggccgaaaggcgagugaggucuccaguuua

SEQ ID NO: 18435 - RNA, 37 nt, Artificial Sequence
  Description of Artificial Sequence:  Enzymatic Nucleic Acid
uccaaaaggccgaaaggcgagugaggucucccucuuc

SEQ ID NO: 18436 - RNA, 37 nt, Artificial Sequence
  Description of Artificial Sequence:  Enzymatic Nucleic Acid
uugaaccagccgaaaggcgagugaggucuuuuuccaa

SEQ ID NO: 18437 - RNA, 37 nt, Artificial Sequence
  Description of Artificial Sequence:  Enzymatic Nucleic Acid
ugcuugaagccgaaaggcgagugaggucucacuuuuc

SEQ ID NO: 18438 - RNA, 37 nt, Artificial Sequence
  Description of Artificial Sequence:  Enzymatic Nucleic Acid
ugcugauggccgaaaggcgagugaggucuuugaacca

SEQ ID NO: 18439 - RNA, 37 nt, Artificial Sequence
  Description of Artificial Sequence:  Enzymatic Nucleic Acid
gccaaauggccgaaaggcgagugaggucuugaugcuu

SEQ ID NO: 18440 - RNA, 37 nt, Artificial Sequence
  Description of Artificial Sequence:  Enzymatic Nucleic Acid
ucuuaauggccgaaaggcgagugaggucucaaaugcu

SEQ ID NO: 18441 - RNA, 37 nt, Artificial Sequence
  Description of Artificial Sequence:  Enzymatic Nucleic Acid
guccggcagccgaaaggcgagugaggucuguagguga

SEQ ID NO: 18442 - RNA, 37 nt, Artificial Sequence
  Description of Artificial Sequence:  Enzymatic Nucleic Acid
caguccgggccgaaaggcgagugaggucuacguaggu

SEQ ID NO: 18443 - RNA, 37 nt, Artificial Sequence
  Description of Artificial Sequence:  Enzymatic Nucleic Acid
cacagccagccgaaaggcgagugaggucuaguccggc

SEQ ID NO: 18444 - RNA, 37 nt, Artificial Sequence
  Description of Artificial Sequence:  Enzymatic Nucleic Acid
uuucacaggccgaaaggcgagugaggucucacagucc

SEQ ID NO: 18445 - RNA, 37 nt, Artificial Sequence
  Description of Artificial Sequence:  Enzymatic Nucleic Acid
cauuuucagccgaaaggcgagugaggucuagccacag

SEQ ID NO: 18446 - RNA, 37 nt, Artificial Sequence
  Description of Artificial Sequence:  Enzymatic Nucleic Acid
ucuuucaggccgaaaggcgagugaggucuauuuucac

SEQ ID NO: 18447 - RNA, 37 nt, Artificial Sequence
  Description of Artificial Sequence:  Enzymatic Nucleic Acid
ggccgugggccgaaaggcgagugaggucuccccucuu

SEQ ID NO: 18448 - RNA, 37 nt, Artificial Sequence
  Description of Artificial Sequence:  Enzymatic Nucleic Acid
cucgcugggccgaaaggcgagugaggucucguggccc

SEQ ID NO: 18449 - RNA, 37 nt, Artificial Sequence
  Description of Artificial Sequence:  Enzymatic Nucleic Acid
uguacucggccgaaaggcgagugaggucuuggccgug

SEQ ID NO: 18450 - RNA, 37 nt, Artificial Sequence
  Description of Artificial Sequence:  Enzymatic Nucleic Acid
gcuuuguagccgaaaggcgagugaggucuucgcuggc

SEQ ID NO: 18451 - RNA, 37 nt, Artificial Sequence
  Description of Artificial Sequence:  Enzymatic Nucleic Acid
caucagaggccgaaaggcgagugaggucuuuuguacu

SEQ ID NO: 18452 - RNA, 37 nt, Artificial Sequence
  Description of Artificial Sequence:  Enzymatic Nucleic Acid
auuuuuaggccgaaaggcgagugaggucuucagucau

SEQ ID NO: 18453 - RNA, 37 nt, Artificial Sequence
  Description of Artificial Sequence:  Enzymatic Nucleic Acid
gauggugggccgaaaggcgagugaggucucaaugugg

SEQ ID NO: 18454 - RNA, 37 nt, Artificial Sequence
  Description of Artificial Sequence:  Enzymatic Nucleic Acid
guuaaccagccgaaaggcgagugaggucuguucagau

SEQ ID NO: 18455 - RNA, 37 nt, Artificial Sequence
  Description of Artificial Sequence:  Enzymatic Nucleic Acid
cagguuaagccgaaaggcgagugaggucucacguuca

SEQ ID NO: 18456 - RNA, 37 nt, Artificial Sequence
  Description of Artificial Sequence:  Enzymatic Nucleic Acid
gcucccaggccgaaaggcgagugaggucuagguuaac

SEQ ID NO: 18457 - RNA, 37 nt, Artificial Sequence
  Description of Artificial Sequence:  Enzymatic Nucleic Acid
ggugcagggccgaaaggcgagugaggucuucccagca

SEQ ID NO: 18458 - RNA, 37 nt, Artificial Sequence
  Description of Artificial Sequence:  Enzymatic Nucleic Acid
gcuugguggccgaaaggcgagugaggucuaggcuccc

SEQ ID NO: 18459 - RNA, 37 nt, Artificial Sequence
  Description of Artificial Sequence:  Enzymatic Nucleic Acid
ccuccuuggccgaaaggcgagugaggucuuuggugca

SEQ ID NO: 18460 - RNA, 37 nt, Artificial Sequence
  Description of Artificial Sequence:  Enzymatic Nucleic Acid
aucagagggccgaaaggcgagugaggucuccuccuug

SEQ ID NO: 18461 - RNA, 37 nt, Artificial Sequence
  Description of Artificial Sequence:  Enzymatic Nucleic Acid
aacaaucagccgaaaggcgagugaggucucaucagag

SEQ ID NO: 18462 - RNA, 37 nt, Artificial Sequence
  Description of Artificial Sequence:  Enzymatic Nucleic Acid
guauucaagccgaaaggcgagugaggucuaaucacca

SEQ ID NO: 18463 - RNA, 37 nt, Artificial Sequence
  Description of Artificial Sequence:  Enzymatic Nucleic Acid
cauauuuggccgaaaggcgagugaggucuaguauuca

SEQ ID NO: 18464 - RNA, 37 nt, Artificial Sequence
  Description of Artificial Sequence:  Enzymatic Nucleic Acid
cacguuuggccgaaaggcgagugaggucuucuugagg

SEQ ID NO: 18465 - RNA, 37 nt, Artificial Sequence
  Description of Artificial Sequence:  Enzymatic Nucleic Acid
auaagucagccgaaaggcgagugaggucuguuugcuc

SEQ ID NO: 18466 - RNA, 37 nt, Artificial Sequence
  Description of Artificial Sequence:  Enzymatic Nucleic Acid
uagugcuggccgaaaggcgagugaggucuauccuugu

SEQ ID NO: 18467 - RNA, 37 nt, Artificial Sequence
  Description of Artificial Sequence:  Enzymatic Nucleic Acid
guguaguggccgaaaggcgagugaggucuugcauccu

SEQ ID NO: 18468 - RNA, 37 nt, Artificial Sequence
  Description of Artificial Sequence:  Enzymatic Nucleic Acid
uucuuagggccgaaaggcgagugaggucuuccaugug

SEQ ID NO: 18469 - RNA, 37 nt, Artificial Sequence
  Description of Artificial Sequence:  Enzymatic Nucleic Acid
aggccugggccgaaaggcgagugaggucuuccauuuu

SEQ ID NO: 18470 - RNA, 37 nt, Artificial Sequence
  Description of Artificial Sequence:  Enzymatic Nucleic Acid
guuccagggccgaaaggcgagugaggucucuggcucc

SEQ ID NO: 18471 - RNA, 37 nt, Artificial Sequence
  Description of Artificial Sequence:  Enzymatic Nucleic Acid
guuucuuggccgaaaggcgagugaggucucuuguucc

SEQ ID NO: 18472 - RNA, 37 nt, Artificial Sequence
  Description of Artificial Sequence:  Enzymatic Nucleic Acid
uggugacggccgaaaggcgagugaggucuuaucuagu

SEQ ID NO: 18473 - RNA, 37 nt, Artificial Sequence
  Description of Artificial Sequence:  Enzymatic Nucleic Acid
gcuggugagccgaaaggcgagugaggucugcuaucua

SEQ ID NO: 18474 - RNA, 37 nt, Artificial Sequence
  Description of Artificial Sequence:  Enzymatic Nucleic Acid
uuucgcuggccgaaaggcgagugaggucuuggugacg

SEQ ID NO: 18475 - RNA, 37 nt, Artificial Sequence
  Description of Artificial Sequence:  Enzymatic Nucleic Acid
agcuuucggccgaaaggcgagugaggucuugcuggug

SEQ ID NO: 18476 - RNA, 37 nt, Artificial Sequence
  Description of Artificial Sequence:  Enzymatic Nucleic Acid
ucgcaaaggccgaaaggcgagugaggucuuuucgcug

SEQ ID NO: 18477 - RNA, 37 nt, Artificial Sequence
  Description of Artificial Sequence:  Enzymatic Nucleic Acid
ggagcucggccgaaaggcgagugaggucuaaagcuuu

SEQ ID NO: 18478 - RNA, 37 nt, Artificial Sequence
  Description of Artificial Sequence:  Enzymatic Nucleic Acid
agccggaggccgaaaggcgagugaggucuucgcaaag

SEQ ID NO: 18479 - RNA, 37 nt, Artificial Sequence
  Description of Artificial Sequence:  Enzymatic Nucleic Acid
ccugaaaggccgaaaggcgagugaggucucggagcuc

SEQ ID NO: 18480 - RNA, 37 nt, Artificial Sequence
  Description of Artificial Sequence:  Enzymatic Nucleic Acid
cacucagagccgaaaggcgagugaggucuuuuuaucu

SEQ ID NO: 18481 - RNA, 37 nt, Artificial Sequence
  Description of Artificial Sequence:  Enzymatic Nucleic Acid
caacaucagccgaaaggcgagugaggucuucagacuu

SEQ ID NO: 18482 - RNA, 37 nt, Artificial Sequence
  Description of Artificial Sequence:  Enzymatic Nucleic Acid
uuccucaagccgaaaggcgagugaggucuaucacuca

SEQ ID NO: 18483 - RNA, 37 nt, Artificial Sequence
  Description of Artificial Sequence:  Enzymatic Nucleic Acid
uguagaaagccgaaaggcgagugaggucucgucagaa

SEQ ID NO: 18484 - RNA, 37 nt, Artificial Sequence
  Description of Artificial Sequence:  Enzymatic Nucleic Acid
gugauggggccgaaaggcgagugaggucuuccuugua

SEQ ID NO: 18485 - RNA, 37 nt, Artificial Sequence
  Description of Artificial Sequence:  Enzymatic Nucleic Acid
cuugaaaagccgaaaggcgagugaggucuuguaagaa

SEQ ID NO: 18486 - RNA, 37 nt, Artificial Sequence
  Description of Artificial Sequence:  Enzymatic Nucleic Acid
ucuggccagccgaaaggcgagugaggucuuugaaaac

SEQ ID NO: 18487 - RNA, 37 nt, Artificial Sequence
  Description of Artificial Sequence:  Enzymatic Nucleic Acid
gccucugggccgaaaggcgagugaggucucacuugaa

SEQ ID NO: 18488 - RNA, 37 nt, Artificial Sequence
  Description of Artificial Sequence:  Enzymatic Nucleic Acid
acuccauggccgaaaggcgagugaggucucucuggcc

SEQ ID NO: 18489 - RNA, 37 nt, Artificial Sequence
  Description of Artificial Sequence:  Enzymatic Nucleic Acid
gacaggaagccgaaaggcgagugaggucuuccaugcc

SEQ ID NO: 18490 - RNA, 37 nt, Artificial Sequence
  Description of Artificial Sequence:  Enzymatic Nucleic Acid
cuggaagagccgaaaggcgagugaggucuaggaacuc

SEQ ID NO: 18491 - RNA, 37 nt, Artificial Sequence
  Description of Artificial Sequence:  Enzymatic Nucleic Acid
ugaaugcagccgaaaggcgagugaggucuuuucugga

SEQ ID NO: 18492 - RNA, 37 nt, Artificial Sequence
  Description of Artificial Sequence:  Enzymatic Nucleic Acid
gaugaauggccgaaaggcgagugaggucuacuuucug

SEQ ID NO: 18493 - RNA, 37 nt, Artificial Sequence
  Description of Artificial Sequence:  Enzymatic Nucleic Acid
ucucgcuggccgaaaggcgagugaggucucagguccc

SEQ ID NO: 18494 - RNA, 37 nt, Artificial Sequence
  Description of Artificial Sequence:  Enzymatic Nucleic Acid
guuucucggccgaaaggcgagugaggucuugccaggu

SEQ ID NO: 18495 - RNA, 37 nt, Artificial Sequence
  Description of Artificial Sequence:  Enzymatic Nucleic Acid
cuucaccagccgaaaggcgagugaggucuguuguucu

SEQ ID NO: 18496 - RNA, 37 nt, Artificial Sequence
  Description of Artificial Sequence:  Enzymatic Nucleic Acid
aaucuucagccgaaaggcgagugaggucucacguugu

SEQ ID NO: 18497 - RNA, 37 nt, Artificial Sequence
  Description of Artificial Sequence:  Enzymatic Nucleic Acid
caaaaucagccgaaaggcgagugaggucuaaaucuuc

SEQ ID NO: 18498 - RNA, 37 nt, Artificial Sequence
  Description of Artificial Sequence:  Enzymatic Nucleic Acid
gggcaagggccgaaaggcgagugaggucucaaaauca

SEQ ID NO: 18499 - RNA, 37 nt, Artificial Sequence
  Description of Artificial Sequence:  Enzymatic Nucleic Acid
aucccggggccgaaaggcgagugaggucuaaggccaa

SEQ ID NO: 18500 - RNA, 37 nt, Artificial Sequence
  Description of Artificial Sequence:  Enzymatic Nucleic Acid
uuuucucagccgaaaggcgagugaggucuauaaucgg

SEQ ID NO: 18501 - RNA, 37 nt, Artificial Sequence
  Description of Artificial Sequence:  Enzymatic Nucleic Acid
uucgggaggccgaaaggcgagugaggucucauccauu

SEQ ID NO: 18502 - RNA, 37 nt, Artificial Sequence
  Description of Artificial Sequence:  Enzymatic Nucleic Acid
ucuugguggccgaaaggcgagugaggucuuguagauu

SEQ ID NO: 18503 - RNA, 37 nt, Artificial Sequence
  Description of Artificial Sequence:  Enzymatic Nucleic Acid
acacgucggccgaaaggcgagugaggucuucuuggug

SEQ ID NO: 18504 - RNA, 37 nt, Artificial Sequence
  Description of Artificial Sequence:  Enzymatic Nucleic Acid
agaccacagccgaaaggcgagugaggucugucgcucu

SEQ ID NO: 18505 - RNA, 37 nt, Artificial Sequence
  Description of Artificial Sequence:  Enzymatic Nucleic Acid
uaagaccagccgaaaggcgagugaggucuacgucgcu

SEQ ID NO: 18506 - RNA, 37 nt, Artificial Sequence
  Description of Artificial Sequence:  Enzymatic Nucleic Acid
ccguaagagccgaaaggcgagugaggucucacacguc

SEQ ID NO: 18507 - RNA, 37 nt, Artificial Sequence
  Description of Artificial Sequence:  Enzymatic Nucleic Acid
cagcaauagccgaaaggcgagugaggucuuccguaag

SEQ ID NO: 18508 - RNA, 37 nt, Artificial Sequence
  Description of Artificial Sequence:  Enzymatic Nucleic Acid
ucccacaggccgaaaggcgagugaggucuaauacucc

SEQ ID NO: 18509 - RNA, 37 nt, Artificial Sequence
  Description of Artificial Sequence:  Enzymatic Nucleic Acid
auuucccagccgaaaggcgagugaggucuagcaauac

SEQ ID NO: 18510 - RNA, 37 nt, Artificial Sequence
  Description of Artificial Sequence:  Enzymatic Nucleic Acid
gagacccagccgaaaggcgagugaggucucuaaggag

SEQ ID NO: 18511 - RNA, 37 nt, Artificial Sequence
  Description of Artificial Sequence:  Enzymatic Nucleic Acid
uauggagagccgaaaggcgagugaggucuccaccuaa

SEQ ID NO: 18512 - RNA, 37 nt, Artificial Sequence
  Description of Artificial Sequence:  Enzymatic Nucleic Acid
cauuuguagccgaaaggcgagugaggucuuccugggu

SEQ ID NO: 18513 - RNA, 37 nt, Artificial Sequence
  Description of Artificial Sequence:  Enzymatic Nucleic Acid
ggcgacuggccgaaaggcgagugaggucuaaaagucc

SEQ ID NO: 18514 - RNA, 37 nt, Artificial Sequence
  Description of Artificial Sequence:  Enzymatic Nucleic Acid
ucaggcgagccgaaaggcgagugaggucuugcaaaag

SEQ ID NO: 18515 - RNA, 37 nt, Artificial Sequence
  Description of Artificial Sequence:  Enzymatic Nucleic Acid
cccucagggccgaaaggcgagugaggucugacugcaa

SEQ ID NO: 18516 - RNA, 37 nt, Artificial Sequence
  Description of Artificial Sequence:  Enzymatic Nucleic Acid
uccucauggccgaaaggcgagugaggucucuucccuc

SEQ ID NO: 18517 - RNA, 37 nt, Artificial Sequence
  Description of Artificial Sequence:  Enzymatic Nucleic Acid
cucaggaggccgaaaggcgagugaggucuucucaucc

SEQ ID NO: 18518 - RNA, 37 nt, Artificial Sequence
  Description of Artificial Sequence:  Enzymatic Nucleic Acid
guagaguagccgaaaggcgagugaggucuucaggagc

SEQ ID NO: 18519 - RNA, 37 nt, Artificial Sequence
  Description of Artificial Sequence:  Enzymatic Nucleic Acid
caguccaggccgaaaggcgagugaggucuaugaucug

SEQ ID NO: 18520 - RNA, 37 nt, Artificial Sequence
  Description of Artificial Sequence:  Enzymatic Nucleic Acid
ugugccaggccgaaaggcgagugaggucuaguccagc

SEQ ID NO: 18521 - RNA, 37 nt, Artificial Sequence
  Description of Artificial Sequence:  Enzymatic Nucleic Acid
ucucuguggccgaaaggcgagugaggucucagcaguc

SEQ ID NO: 18522 - RNA, 37 nt, Artificial Sequence
  Description of Artificial Sequence:  Enzymatic Nucleic Acid
aaucuugggccgaaaggcgagugaggucucuuucuuu

SEQ ID NO: 18523 - RNA, 37 nt, Artificial Sequence
  Description of Artificial Sequence:  Enzymatic Nucleic Acid
aaguucuggccgaaaggcgagugaggucuaaaucuug

SEQ ID NO: 18524 - RNA, 37 nt, Artificial Sequence
  Description of Artificial Sequence:  Enzymatic Nucleic Acid
uuuuuccagccgaaaggcgagugaggucuaaguucug

SEQ ID NO: 18525 - RNA, 37 nt, Artificial Sequence
  Description of Artificial Sequence:  Enzymatic Nucleic Acid
gcaaaucagccgaaaggcgagugaggucucuaguuuu

SEQ ID NO: 18526 - RNA, 37 nt, Artificial Sequence
  Description of Artificial Sequence:  Enzymatic Nucleic Acid
gcuugaaggccgaaaggcgagugaggucuaaaucacc

SEQ ID NO: 18527 - RNA, 37 nt, Artificial Sequence
  Description of Artificial Sequence:  Enzymatic Nucleic Acid
uacauuuggccgaaaggcgagugaggucuuugaagca

SEQ ID NO: 18528 - RNA, 37 nt, Artificial Sequence
  Description of Artificial Sequence:  Enzymatic Nucleic Acid
cuguuguagccgaaaggcgagugaggucuauuugcuu

SEQ ID NO: 18529 - RNA, 37 nt, Artificial Sequence
  Description of Artificial Sequence:  Enzymatic Nucleic Acid
agucuuuagccgaaaggcgagugaggucucauccugu

SEQ ID NO: 18530 - RNA, 37 nt, Artificial Sequence
  Description of Artificial Sequence:  Enzymatic Nucleic Acid
caguaugggccgaaaggcgagugaggucuauugauug

SEQ ID NO: 18531 - RNA, 37 nt, Artificial Sequence
  Description of Artificial Sequence:  Enzymatic Nucleic Acid
uaaacccagccgaaaggcgagugaggucuuauuuccu

SEQ ID NO: 18532 - RNA, 37 nt, Artificial Sequence
  Description of Artificial Sequence:  Enzymatic Nucleic Acid
uauguaaagccgaaaggcgagugaggucuccacuauu

SEQ ID NO: 18533 - RNA, 37 nt, Artificial Sequence
  Description of Artificial Sequence:  Enzymatic Nucleic Acid
agagaagggccgaaaggcgagugaggucuaggaguug

SEQ ID NO: 18534 - RNA, 37 nt, Artificial Sequence
  Description of Artificial Sequence:  Enzymatic Nucleic Acid
cugaaauagccgaaaggcgagugaggucuuuuccuug

SEQ ID NO: 18535 - RNA, 37 nt, Artificial Sequence
  Description of Artificial Sequence:  Enzymatic Nucleic Acid
cuucggaggccgaaaggcgagugaggucuugaaauac

SEQ ID NO: 18536 - RNA, 37 nt, Artificial Sequence
  Description of Artificial Sequence:  Enzymatic Nucleic Acid
gaauuaaagccgaaaggcgagugaggucuuucggagc

SEQ ID NO: 18537 - RNA, 37 nt, Artificial Sequence
  Description of Artificial Sequence:  Enzymatic Nucleic Acid
caucagaggccgaaaggcgagugaggucuuuccugaa

SEQ ID NO: 18538 - RNA, 37 nt, Artificial Sequence
  Description of Artificial Sequence:  Enzymatic Nucleic Acid
auaucugagccgaaaggcgagugaggucuaucaucag

SEQ ID NO: 18539 - RNA, 37 nt, Artificial Sequence
  Description of Artificial Sequence:  Enzymatic Nucleic Acid
agcauuuagccgaaaggcgagugaggucuauaucuga

SEQ ID NO: 18540 - RNA, 37 nt, Artificial Sequence
  Description of Artificial Sequence:  Enzymatic Nucleic Acid
cuugaaaggccgaaaggcgagugaggucuauuuacau

SEQ ID NO: 18541 - RNA, 37 nt, Artificial Sequence
  Description of Artificial Sequence:  Enzymatic Nucleic Acid
cucaugaagccgaaaggcgagugaggucuuugaaagc

SEQ ID NO: 18542 - RNA, 37 nt, Artificial Sequence
  Description of Artificial Sequence:  Enzymatic Nucleic Acid
uuuccagggccgaaaggcgagugaggucuucaugaac

SEQ ID NO: 18543 - RNA, 37 nt, Artificial Sequence
  Description of Artificial Sequence:  Enzymatic Nucleic Acid
ggaggugggccgaaaggcgagugaggucuauucggua

SEQ ID NO: 18544 - RNA, 37 nt, Artificial Sequence
  Description of Artificial Sequence:  Enzymatic Nucleic Acid
ucaucaaagccgaaaggcgagugaggucuauggaggu

SEQ ID NO: 18545 - RNA, 37 nt, Artificial Sequence
  Description of Artificial Sequence:  Enzymatic Nucleic Acid
ugcugucggccgaaaggcgagugaggucuccugguag

SEQ ID NO: 18546 - RNA, 37 nt, Artificial Sequence
  Description of Artificial Sequence:  Enzymatic Nucleic Acid
gagugcuggccgaaaggcgagugaggucuugucgccc

SEQ ID NO: 18547 - RNA, 37 nt, Artificial Sequence
  Description of Artificial Sequence:  Enzymatic Nucleic Acid
acagaguggccgaaaggcgagugaggucuugcugucg

SEQ ID NO: 18548 - RNA, 37 nt, Artificial Sequence
  Description of Artificial Sequence:  Enzymatic Nucleic Acid
gaggccaagccgaaaggcgagugaggucuagagugcu

SEQ ID NO: 18549 - RNA, 37 nt, Artificial Sequence
  Description of Artificial Sequence:  Enzymatic Nucleic Acid
gggagagggccgaaaggcgagugaggucucaacagag

SEQ ID NO: 18550 - RNA, 37 nt, Artificial Sequence
  Description of Artificial Sequence:  Enzymatic Nucleic Acid
cgcuucaggccgaaaggcgagugaggucuaugggaga

SEQ ID NO: 18551 - RNA, 37 nt, Artificial Sequence
  Description of Artificial Sequence:  Enzymatic Nucleic Acid
gugaagcggccgaaaggcgagugaggucuuucagcau

SEQ ID NO: 18552 - RNA, 37 nt, Artificial Sequence
  Description of Artificial Sequence:  Enzymatic Nucleic Acid
aggugaaggccgaaaggcgagugaggucugcuucagc

SEQ ID NO: 18553 - RNA, 37 nt, Artificial Sequence
  Description of Artificial Sequence:  Enzymatic Nucleic Acid
uggguuuggccgaaaggcgagugaggucuugucaguc

SEQ ID NO: 18554 - RNA, 37 nt, Artificial Sequence
  Description of Artificial Sequence:  Enzymatic Nucleic Acid
gagcgagggccgaaaggcgagugaggucucuuggguu

SEQ ID NO: 18555 - RNA, 37 nt, Artificial Sequence
  Description of Artificial Sequence:  Enzymatic Nucleic Acid
aucuugaggccgaaaggcgagugaggucugaggccuu

SEQ ID NO: 18556 - RNA, 37 nt, Artificial Sequence
  Description of Artificial Sequence:  Enzymatic Nucleic Acid
acugguuagccgaaaggcgagugaggucuucucaagu

SEQ ID NO: 18557 - RNA, 37 nt, Artificial Sequence
  Description of Artificial Sequence:  Enzymatic Nucleic Acid
uacuuuuagccgaaaggcgagugaggucuugguuacu

SEQ ID NO: 18558 - RNA, 37 nt, Artificial Sequence
  Description of Artificial Sequence:  Enzymatic Nucleic Acid
acuccuuagccgaaaggcgagugaggucuuuuuacug

SEQ ID NO: 18559 - RNA, 37 nt, Artificial Sequence
  Description of Artificial Sequence:  Enzymatic Nucleic Acid
agccccgagccgaaaggcgagugaggucuuccuuacu

SEQ ID NO: 18560 - RNA, 37 nt, Artificial Sequence
  Description of Artificial Sequence:  Enzymatic Nucleic Acid
ucagacaggccgaaaggcgagugaggucucccgacuc

SEQ ID NO: 18561 - RNA, 37 nt, Artificial Sequence
  Description of Artificial Sequence:  Enzymatic Nucleic Acid
acaucagagccgaaaggcgagugaggucuagccccga

SEQ ID NO: 18562 - RNA, 37 nt, Artificial Sequence
  Description of Artificial Sequence:  Enzymatic Nucleic Acid
ccugcugagccgaaaggcgagugaggucuaucagaca

SEQ ID NO: 18563 - RNA, 37 nt, Artificial Sequence
  Description of Artificial Sequence:  Enzymatic Nucleic Acid
ugggccuggccgaaaggcgagugaggucuugacauca

SEQ ID NO: 18564 - RNA, 37 nt, Artificial Sequence
  Description of Artificial Sequence:  Enzymatic Nucleic Acid
aaacuggggccgaaaggcgagugaggucucugcugac

SEQ ID NO: 18565 - RNA, 37 nt, Artificial Sequence
  Description of Artificial Sequence:  Enzymatic Nucleic Acid
ggcagaaagccgaaaggcgagugaggucuugggccug

SEQ ID NO: 18566 - RNA, 37 nt, Artificial Sequence
  Description of Artificial Sequence:  Enzymatic Nucleic Acid
uggaaugggccgaaaggcgagugaggucuagaaacug

SEQ ID NO: 18567 - RNA, 37 nt, Artificial Sequence
  Description of Artificial Sequence:  Enzymatic Nucleic Acid
gcccacaggccgaaaggcgagugaggucuuggaaugg

SEQ ID NO: 18568 - RNA, 37 nt, Artificial Sequence
  Description of Artificial Sequence:  Enzymatic Nucleic Acid
cgugcccagccgaaaggcgagugaggucuagcuggaa

SEQ ID NO: 18569 - RNA, 37 nt, Artificial Sequence
  Description of Artificial Sequence:  Enzymatic Nucleic Acid
cugacguggccgaaaggcgagugaggucuccacagcu

SEQ ID NO: 18570 - RNA, 37 nt, Artificial Sequence
  Description of Artificial Sequence:  Enzymatic Nucleic Acid
uucgcugagccgaaaggcgagugaggucugugcccac

SEQ ID NO: 18571 - RNA, 37 nt, Artificial Sequence
  Description of Artificial Sequence:  Enzymatic Nucleic Acid
ugccuucggccgaaaggcgagugaggucuugacgugc

SEQ ID NO: 18572 - RNA, 37 nt, Artificial Sequence
  Description of Artificial Sequence:  Enzymatic Nucleic Acid
ugcgcuuggccgaaaggcgagugaggucucuucgcug

SEQ ID NO: 18573 - RNA, 37 nt, Artificial Sequence
  Description of Artificial Sequence:  Enzymatic Nucleic Acid
aaccugcggccgaaaggcgagugaggucuuugccuuc

SEQ ID NO: 18574 - RNA, 37 nt, Artificial Sequence
  Description of Artificial Sequence:  Enzymatic Nucleic Acid
ugaaccuggccgaaaggcgagugaggucugcuugccu

SEQ ID NO: 18575 - RNA, 37 nt, Artificial Sequence
  Description of Artificial Sequence:  Enzymatic Nucleic Acid
uaggugaagccgaaaggcgagugaggucucugcgcuu

SEQ ID NO: 18576 - RNA, 37 nt, Artificial Sequence
  Description of Artificial Sequence:  Enzymatic Nucleic Acid
cagcucaggccgaaaggcgagugaggucuguggucgu

SEQ ID NO: 18577 - RNA, 37 nt, Artificial Sequence
  Description of Artificial Sequence:  Enzymatic Nucleic Acid
cuuuccaggccgaaaggcgagugaggucuucagcgug

SEQ ID NO: 18578 - RNA, 37 nt, Artificial Sequence
  Description of Artificial Sequence:  Enzymatic Nucleic Acid
gcagcacggccgaaaggcgagugaggucugauuuucc

SEQ ID NO: 18579 - RNA, 37 nt, Artificial Sequence
  Description of Artificial Sequence:  Enzymatic Nucleic Acid
gagcagcagccgaaaggcgagugaggucugcgauuuu

SEQ ID NO: 18580 - RNA, 37 nt, Artificial Sequence
  Description of Artificial Sequence:  Enzymatic Nucleic Acid
gggagcaggccgaaaggcgagugaggucuacgcgauu

SEQ ID NO: 18581 - RNA, 37 nt, Artificial Sequence
  Description of Artificial Sequence:  Enzymatic Nucleic Acid
gcggggaggccgaaaggcgagugaggucuagcacgcg

SEQ ID NO: 18582 - RNA, 37 nt, Artificial Sequence
  Description of Artificial Sequence:  Enzymatic Nucleic Acid
ucuggggggccgaaaggcgagugaggucuggggagca

SEQ ID NO: 18583 - RNA, 37 nt, Artificial Sequence
  Description of Artificial Sequence:  Enzymatic Nucleic Acid
caggaccagccgaaaggcgagugaggucucgaguugu

SEQ ID NO: 18584 - RNA, 37 nt, Artificial Sequence
  Description of Artificial Sequence:  Enzymatic Nucleic Acid
guacaggagccgaaaggcgagugaggucucaccgagu

SEQ ID NO: 18585 - RNA, 37 nt, Artificial Sequence
  Description of Artificial Sequence:  Enzymatic Nucleic Acid
guggaguagccgaaaggcgagugaggucuaggaccac

SEQ ID NO: 18586 - RNA, 37 nt, Artificial Sequence
  Description of Artificial Sequence:  Enzymatic Nucleic Acid
gugucaaagccgaaaggcgagugaggucuucuagaug

SEQ ID NO: 18587 - RNA, 37 nt, Artificial Sequence
  Description of Artificial Sequence:  Enzymatic Nucleic Acid
aaauaagggccgaaaggcgagugaggucuuucguguc

SEQ ID NO: 18588 - RNA, 37 nt, Artificial Sequence
  Description of Artificial Sequence:  Enzymatic Nucleic Acid
cacauguggccgaaaggcgagugaggucuuucuagaa

SEQ ID NO: 18589 - RNA, 37 nt, Artificial Sequence
  Description of Artificial Sequence:  Enzymatic Nucleic Acid
uaaauacagccgaaaggcgagugaggucuaugugcuu

SEQ ID NO: 18590 - RNA, 37 nt, Artificial Sequence
  Description of Artificial Sequence:  Enzymatic Nucleic Acid
uauaaauagccgaaaggcgagugaggucuacaugugc

SEQ ID NO: 18591 - RNA, 37 nt, Artificial Sequence
  Description of Artificial Sequence:  Enzymatic Nucleic Acid
ggcaaaaggccgaaaggcgagugaggucuuaguuucc

SEQ ID NO: 18592 - RNA, 37 nt, Artificial Sequence
  Description of Artificial Sequence:  Enzymatic Nucleic Acid
aauacugggccgaaaggcgagugaggucuaaaagcua

SEQ ID NO: 18593 - RNA, 37 nt, Artificial Sequence
  Description of Artificial Sequence:  Enzymatic Nucleic Acid
gcauaauagccgaaaggcgagugaggucuuggcaaaa

SEQ ID NO: 18594 - RNA, 37 nt, Artificial Sequence
  Description of Artificial Sequence:  Enzymatic Nucleic Acid
uauauauggccgaaaggcgagugaggucuauaauacu

SEQ ID NO: 18595 - RNA, 37 nt, Artificial Sequence
  Description of Artificial Sequence:  Enzymatic Nucleic Acid
gguguaaagccgaaaggcgagugaggucuuuauauau

SEQ ID NO: 18596 - RNA, 37 nt, Artificial Sequence
  Description of Artificial Sequence:  Enzymatic Nucleic Acid
gcagcugggccgaaaggcgagugaggucuucccaugg

SEQ ID NO: 18597 - RNA, 37 nt, Artificial Sequence
  Description of Artificial Sequence:  Enzymatic Nucleic Acid
aaaagcaggccgaaaggcgagugaggucuuggcuccc

SEQ ID NO: 18598 - RNA, 37 nt, Artificial Sequence
  Description of Artificial Sequence:  Enzymatic Nucleic Acid
acaaaaaggccgaaaggcgagugaggucuagcuggcu

SEQ ID NO: 18599 - RNA, 37 nt, Artificial Sequence
  Description of Artificial Sequence:  Enzymatic Nucleic Acid
aaaaaucagccgaaaggcgagugaggucuaaaaagca

SEQ ID NO: 18600 - RNA, 37 nt, Artificial Sequence
  Description of Artificial Sequence:  Enzymatic Nucleic Acid
aaaaagcagccgaaaggcgagugaggucuuauuaaaa

SEQ ID NO: 18601 - RNA, 37 nt, Artificial Sequence
  Description of Artificial Sequence:  Enzymatic Nucleic Acid
aaaaaaaggccgaaaggcgagugaggucuacuauuaa

SEQ ID NO: 18602 - RNA, 37 nt, Artificial Sequence
  Description of Artificial Sequence:  Enzymatic Nucleic Acid
uggaguuagccgaaaggcgagugaggucuauucuugu

SEQ ID NO: 18603 - RNA, 37 nt, Artificial Sequence
  Description of Artificial Sequence:  Enzymatic Nucleic Acid
acuugucagccgaaaggcgagugaggucuuauuucuc

SEQ ID NO: 18604 - RNA, 37 nt, Artificial Sequence
  Description of Artificial Sequence:  Enzymatic Nucleic Acid
guucuucagccgaaaggcgagugaggucuuugucacu

SEQ ID NO: 18605 - RNA, 37 nt, Artificial Sequence
  Description of Artificial Sequence:  Enzymatic Nucleic Acid
ggauuuaggccgaaaggcgagugaggucuaguagugu

SEQ ID NO: 18606 - RNA, 37 nt, Artificial Sequence
  Description of Artificial Sequence:  Enzymatic Nucleic Acid
cugaguaagccgaaaggcgagugaggucuaugaggau

SEQ ID NO: 18607 - RNA, 37 nt, Artificial Sequence
  Description of Artificial Sequence:  Enzymatic Nucleic Acid
cucuaacagccgaaaggcgagugaggucuugaguaac

SEQ ID NO: 18608 - RNA, 37 nt, Artificial Sequence
  Description of Artificial Sequence:  Enzymatic Nucleic Acid
uucucuaagccgaaaggcgagugaggucuacugagua

SEQ ID NO: 18609 - RNA, 37 nt, Artificial Sequence
  Description of Artificial Sequence:  Enzymatic Nucleic Acid
gguuggaggccgaaaggcgagugaggucuagggaagu

SEQ ID NO: 18610 - RNA, 37 nt, Artificial Sequence
  Description of Artificial Sequence:  Enzymatic Nucleic Acid
ugaggugggccgaaaggcgagugaggucuggggguug

SEQ ID NO: 18611 - RNA, 37 nt, Artificial Sequence
  Description of Artificial Sequence:  Enzymatic Nucleic Acid
ccugcguggccgaaaggcgagugaggucuccugaggu

SEQ ID NO: 18612 - RNA, 37 nt, Artificial Sequence
  Description of Artificial Sequence:  Enzymatic Nucleic Acid
ugguccuggccgaaaggcgagugaggucugugcccug

SEQ ID NO: 18613 - RNA, 37 nt, Artificial Sequence
  Description of Artificial Sequence:  Enzymatic Nucleic Acid
caaucaaagccgaaaggcgagugaggucuugguccug

SEQ ID NO: 18614 - RNA, 37 nt, Artificial Sequence
  Description of Artificial Sequence:  Enzymatic Nucleic Acid
cagugcaggccgaaaggcgagugaggucuuccucaau

SEQ ID NO: 18615 - RNA, 37 nt, Artificial Sequence
  Description of Artificial Sequence:  Enzymatic Nucleic Acid
gaucaguggccgaaaggcgagugaggucuagcuccuc

SEQ ID NO: 18616 - RNA, 37 nt, Artificial Sequence
  Description of Artificial Sequence:  Enzymatic Nucleic Acid
acgugauggccgaaaggcgagugaggucuauugggug

SEQ ID NO: 18617 - RNA, 37 nt, Artificial Sequence
  Description of Artificial Sequence:  Enzymatic Nucleic Acid
gugggguagccgaaaggcgagugaggucugugaugca

SEQ ID NO: 18618 - RNA, 37 nt, Artificial Sequence
  Description of Artificial Sequence:  Enzymatic Nucleic Acid
agggcugggccgaaaggcgagugaggucuccaguggg

SEQ ID NO: 18619 - RNA, 37 nt, Artificial Sequence
  Description of Artificial Sequence:  Enzymatic Nucleic Acid
cugcaggggccgaaaggcgagugaggucuuggcccag

SEQ ID NO: 18620 - RNA, 37 nt, Artificial Sequence
  Description of Artificial Sequence:  Enzymatic Nucleic Acid
uugggcuggccgaaaggcgagugaggucuagggcugg

SEQ ID NO: 18621 - RNA, 37 nt, Artificial Sequence
  Description of Artificial Sequence:  Enzymatic Nucleic Acid
guuuuggggccgaaaggcgagugaggucuugcagggc

SEQ ID NO: 18622 - RNA, 37 nt, Artificial Sequence
  Description of Artificial Sequence:  Enzymatic Nucleic Acid
gcuuguuggccgaaaggcgagugaggucuccuggguu

SEQ ID NO: 18623 - RNA, 37 nt, Artificial Sequence
  Description of Artificial Sequence:  Enzymatic Nucleic Acid
cuaacggggccgaaaggcgagugaggucuuuguugcc

SEQ ID NO: 18624 - RNA, 37 nt, Artificial Sequence
  Description of Artificial Sequence:  Enzymatic Nucleic Acid
ggggcuaagccgaaaggcgagugaggucugggcuugu

SEQ ID NO: 18625 - RNA, 37 nt, Artificial Sequence
  Description of Artificial Sequence:  Enzymatic Nucleic Acid
cccugggggccgaaaggcgagugaggucuuaacgggc

SEQ ID NO: 18626 - RNA, 37 nt, Artificial Sequence
  Description of Artificial Sequence:  Enzymatic Nucleic Acid
caggccaggccgaaaggcgagugaggucucagugauc

SEQ ID NO: 18627 - RNA, 37 nt, Artificial Sequence
  Description of Artificial Sequence:  Enzymatic Nucleic Acid
ugcucagggccgaaaggcgagugaggucucagccagu

SEQ ID NO: 18628 - RNA, 37 nt, Artificial Sequence
  Description of Artificial Sequence:  Enzymatic Nucleic Acid
agauguuggccgaaaggcgagugaggucuucaggcca

SEQ ID NO: 18629 - RNA, 37 nt, Artificial Sequence
  Description of Artificial Sequence:  Enzymatic Nucleic Acid
cuagaggagccgaaaggcgagugaggucuucccgaga

SEQ ID NO: 18630 - RNA, 37 nt, Artificial Sequence
  Description of Artificial Sequence:  Enzymatic Nucleic Acid
uaggccuggccgaaaggcgagugaggucuuagaggac

SEQ ID NO: 18631 - RNA, 37 nt, Artificial Sequence
  Description of Artificial Sequence:  Enzymatic Nucleic Acid
gucuuagggccgaaaggcgagugaggucucugcuaga

SEQ ID NO: 18632 - RNA, 37 nt, Artificial Sequence
  Description of Artificial Sequence:  Enzymatic Nucleic Acid
ccuccucagccgaaaggcgagugaggucuaugucuua

SEQ ID NO: 18633 - RNA, 37 nt, Artificial Sequence
  Description of Artificial Sequence:  Enzymatic Nucleic Acid
gcuuuuuggccgaaaggcgagugaggucuuuuuuuuc

SEQ ID NO: 18634 - RNA, 37 nt, Artificial Sequence
  Description of Artificial Sequence:  Enzymatic Nucleic Acid
cucccuuggccgaaaggcgagugaggucuuuuuugcu

SEQ ID NO: 18635 - RNA, 37 nt, Artificial Sequence
  Description of Artificial Sequence:  Enzymatic Nucleic Acid
uucucauggccgaaaggcgagugaggucucuucuccc

SEQ ID NO: 18636 - RNA, 37 nt, Artificial Sequence
  Description of Artificial Sequence:  Enzymatic Nucleic Acid
acaugguggccgaaaggcgagugaggucugucucaaa

SEQ ID NO: 18637 - RNA, 37 nt, Artificial Sequence
  Description of Artificial Sequence:  Enzymatic Nucleic Acid
cgugcccagccgaaaggcgagugaggucuauggugcg

SEQ ID NO: 18638 - RNA, 37 nt, Artificial Sequence
  Description of Artificial Sequence:  Enzymatic Nucleic Acid
ccuccguggccgaaaggcgagugaggucuccacaugg

SEQ ID NO: 18639 - RNA, 37 nt, Artificial Sequence
  Description of Artificial Sequence:  Enzymatic Nucleic Acid
uugcugaggccgaaaggcgagugaggucucccguccc

SEQ ID NO: 18640 - RNA, 37 nt, Artificial Sequence
  Description of Artificial Sequence:  Enzymatic Nucleic Acid
uggcauuggccgaaaggcgagugaggucuugagcccc

SEQ ID NO: 18641 - RNA, 37 nt, Artificial Sequence
  Description of Artificial Sequence:  Enzymatic Nucleic Acid
ugaaaugggccgaaaggcgagugaggucuauugcuga

SEQ ID NO: 18642 - RNA, 37 nt, Artificial Sequence
  Description of Artificial Sequence:  Enzymatic Nucleic Acid
ggaagccagccgaaaggcgagugaggucuugaaaugg

SEQ ID NO: 18643 - RNA, 37 nt, Artificial Sequence
  Description of Artificial Sequence:  Enzymatic Nucleic Acid
cugggaaggccgaaaggcgagugaggucucacugaaa

SEQ ID NO: 18644 - RNA, 37 nt, Artificial Sequence
  Description of Artificial Sequence:  Enzymatic Nucleic Acid
ggucagaggccgaaaggcgagugaggucuugggaagc

SEQ ID NO: 18645 - RNA, 37 nt, Artificial Sequence
  Description of Artificial Sequence:  Enzymatic Nucleic Acid
uggcuggggccgaaaggcgagugaggucuccucaaau

SEQ ID NO: 18646 - RNA, 37 nt, Artificial Sequence
  Description of Artificial Sequence:  Enzymatic Nucleic Acid
gcuccugggccgaaaggcgagugaggucuugggcccu

SEQ ID NO: 18647 - RNA, 37 nt, Artificial Sequence
  Description of Artificial Sequence:  Enzymatic Nucleic Acid
uccaucuggccgaaaggcgagugaggucuuccuggcu

SEQ ID NO: 18648 - RNA, 37 nt, Artificial Sequence
  Description of Artificial Sequence:  Enzymatic Nucleic Acid
ccucaucggccgaaaggcgagugaggucuuguccauc

SEQ ID NO: 18649 - RNA, 37 nt, Artificial Sequence
  Description of Artificial Sequence:  Enzymatic Nucleic Acid
uuuucuuggccgaaaggcgagugaggucucucccaga

SEQ ID NO: 18650 - RNA, 37 nt, Artificial Sequence
  Description of Artificial Sequence:  Enzymatic Nucleic Acid
aaaauuuggccgaaaggcgagugaggucuuuuaguuc

SEQ ID NO: 18651 - RNA, 37 nt, Artificial Sequence
  Description of Artificial Sequence:  Enzymatic Nucleic Acid
uagaaccagccgaaaggcgagugaggucuuuccauag

SEQ ID NO: 18652 - RNA, 37 nt, Artificial Sequence
  Description of Artificial Sequence:  Enzymatic Nucleic Acid
acauagaagccgaaaggcgagugaggucucacuucca

SEQ ID NO: 18653 - RNA, 37 nt, Artificial Sequence
  Description of Artificial Sequence:  Enzymatic Nucleic Acid
agaauggagccgaaaggcgagugaggucuauagaacc

SEQ ID NO: 18654 - RNA, 37 nt, Artificial Sequence
  Description of Artificial Sequence:  Enzymatic Nucleic Acid
acaugccagccgaaaggcgagugaggucugaaugaga

SEQ ID NO: 18655 - RNA, 37 nt, Artificial Sequence
  Description of Artificial Sequence:  Enzymatic Nucleic Acid
aaaacauggccgaaaggcgagugaggucucacgaaug

SEQ ID NO: 18656 - RNA, 37 nt, Artificial Sequence
  Description of Artificial Sequence:  Enzymatic Nucleic Acid
aaucaaaagccgaaaggcgagugaggucuaugccacg

SEQ ID NO: 18657 - RNA, 37 nt, Artificial Sequence
  Description of Artificial Sequence:  Enzymatic Nucleic Acid
cagugcuagccgaaaggcgagugaggucuaaaucaaa

SEQ ID NO: 18658 - RNA, 37 nt, Artificial Sequence
  Description of Artificial Sequence:  Enzymatic Nucleic Acid
ccucaguggccgaaaggcgagugaggucuuacaaauc

SEQ ID NO: 18659 - RNA, 37 nt, Artificial Sequence
  Description of Artificial Sequence:  Enzymatic Nucleic Acid
gagugccagccgaaaggcgagugaggucuccucagug

SEQ ID NO: 18660 - RNA, 37 nt, Artificial Sequence
  Description of Artificial Sequence:  Enzymatic Nucleic Acid
guugaguggccgaaaggcgagugaggucucacccuca

SEQ ID NO: 18661 - RNA, 37 nt, Artificial Sequence
  Description of Artificial Sequence:  Enzymatic Nucleic Acid
aguauggggccgaaaggcgagugaggucuucagaguu

SEQ ID NO: 18662 - RNA, 37 nt, Artificial Sequence
  Description of Artificial Sequence:  Enzymatic Nucleic Acid
uagaggaggccgaaaggcgagugaggucucaaaagua

SEQ ID NO: 18663 - RNA, 37 nt, Artificial Sequence
  Description of Artificial Sequence:  Enzymatic Nucleic Acid
gcaucuuagccgaaaggcgagugaggucuuagaggag

SEQ ID NO: 18664 - RNA, 37 nt, Artificial Sequence
  Description of Artificial Sequence:  Enzymatic Nucleic Acid
uuucaguggccgaaaggcgagugaggucuaucuuacu

SEQ ID NO: 18665 - RNA, 37 nt, Artificial Sequence
  Description of Artificial Sequence:  Enzymatic Nucleic Acid
aacucugggccgaaaggcgagugaggucuuaaguuuu

SEQ ID NO: 18666 - RNA, 37 nt, Artificial Sequence
  Description of Artificial Sequence:  Enzymatic Nucleic Acid
caaccuaagccgaaaggcgagugaggucuucuggcua

SEQ ID NO: 18667 - RNA, 37 nt, Artificial Sequence
  Description of Artificial Sequence:  Enzymatic Nucleic Acid
ggagacaagccgaaaggcgagugaggucucuaacucu

SEQ ID NO: 18668 - RNA, 37 nt, Artificial Sequence
  Description of Artificial Sequence:  Enzymatic Nucleic Acid
ccuggagagccgaaaggcgagugaggucuaaccuaac

SEQ ID NO: 18669 - RNA, 37 nt, Artificial Sequence
  Description of Artificial Sequence:  Enzymatic Nucleic Acid
caucaugggccgaaaggcgagugaggucucuggagac

SEQ ID NO: 18670 - RNA, 37 nt, Artificial Sequence
  Description of Artificial Sequence:  Enzymatic Nucleic Acid
guguaagggccgaaaggcgagugaggucucaucaugg

SEQ ID NO: 18671 - RNA, 37 nt, Artificial Sequence
  Description of Artificial Sequence:  Enzymatic Nucleic Acid
gaaugugagccgaaaggcgagugaggucuauuuucag

SEQ ID NO: 18672 - RNA, 37 nt, Artificial Sequence
  Description of Artificial Sequence:  Enzymatic Nucleic Acid
uauuaauagccgaaaggcgagugaggucuccaaaaua

SEQ ID NO: 18673 - RNA, 37 nt, Artificial Sequence
  Description of Artificial Sequence:  Enzymatic Nucleic Acid
ugucuggagccgaaaggcgagugaggucuuauauauu

SEQ ID NO: 18674 - RNA, 37 nt, Artificial Sequence
  Description of Artificial Sequence:  Enzymatic Nucleic Acid
gaauaauagccgaaaggcgagugaggucucaagaaau

SEQ ID NO: 18675 - RNA, 37 nt, Artificial Sequence
  Description of Artificial Sequence:  Enzymatic Nucleic Acid
gugcaaaagccgaaaggcgagugaggucuagaauaau

SEQ ID NO: 18676 - RNA, 37 nt, Artificial Sequence
  Description of Artificial Sequence:  Enzymatic Nucleic Acid
uaacuguggccgaaaggcgagugaggucuaaaacaga

SEQ ID NO: 18677 - RNA, 37 nt, Artificial Sequence
  Description of Artificial Sequence:  Enzymatic Nucleic Acid
acaacuaagccgaaaggcgagugaggucuugugcaaa

SEQ ID NO: 18678 - RNA, 37 nt, Artificial Sequence
  Description of Artificial Sequence:  Enzymatic Nucleic Acid
uuucacaagccgaaaggcgagugaggucuuaacugug

SEQ ID NO: 18679 - RNA, 37 nt, Artificial Sequence
  Description of Artificial Sequence:  Enzymatic Nucleic Acid
uucuuucagccgaaaggcgagugaggucuaacuaacu

SEQ ID NO: 18680 - RNA, 37 nt, Artificial Sequence
  Description of Artificial Sequence:  Enzymatic Nucleic Acid
cuucucaggccgaaaggcgagugaggucuuuucuuuc

SEQ ID NO: 18681 - RNA, 37 nt, Artificial Sequence
  Description of Artificial Sequence:  Enzymatic Nucleic Acid
caggacuggccgaaaggcgagugaggucuauuuucau

SEQ ID NO: 18682 - RNA, 37 nt, Artificial Sequence
  Description of Artificial Sequence:  Enzymatic Nucleic Acid
ccucaggagccgaaaggcgagugaggucuugcauuuu

SEQ ID NO: 18683 - RNA, 37 nt, Artificial Sequence
  Description of Artificial Sequence:  Enzymatic Nucleic Acid
ggagaaaagccgaaaggcgagugaggucuucuccuca

SEQ ID NO: 18684 - RNA, 37 nt, Artificial Sequence
  Description of Artificial Sequence:  Enzymatic Nucleic Acid
uccaucaggccgaaaggcgagugaggucuccucguuu

SEQ ID NO: 18685 - RNA, 37 nt, Artificial Sequence
  Description of Artificial Sequence:  Enzymatic Nucleic Acid
cuuauugagccgaaaggcgagugaggucucuuuuucc

SEQ ID NO: 18686 - RNA, 37 nt, Artificial Sequence
  Description of Artificial Sequence:  Enzymatic Nucleic Acid
ucccuugagccgaaaggcgagugaggucucuuauuga

SEQ ID NO: 18687 - RNA, 37 nt, Artificial Sequence
  Description of Artificial Sequence:  Enzymatic Nucleic Acid
uauagagagccgaaaggcgagugaggucuggggucuu

SEQ ID NO: 18688 - RNA, 37 nt, Artificial Sequence
  Description of Artificial Sequence:  Enzymatic Nucleic Acid
ggucccaagccgaaaggcgagugaggucuuguguugg

SEQ ID NO: 18689 - RNA, 37 nt, Artificial Sequence
  Description of Artificial Sequence:  Enzymatic Nucleic Acid
gugacugagccgaaaggcgagugaggucuuuccugug

SEQ ID NO: 18690 - RNA, 37 nt, Artificial Sequence
  Description of Artificial Sequence:  Enzymatic Nucleic Acid
aaacgugagccgaaaggcgagugaggucuugacuucc

SEQ ID NO: 18691 - RNA, 37 nt, Artificial Sequence
  Description of Artificial Sequence:  Enzymatic Nucleic Acid
aaaggaaagccgaaaggcgagugaggucugugacuga

SEQ ID NO: 18692 - RNA, 37 nt, Artificial Sequence
  Description of Artificial Sequence:  Enzymatic Nucleic Acid
cucuuccagccgaaaggcgagugaggucuauccuuuc

SEQ ID NO: 18693 - RNA, 37 nt, Artificial Sequence
  Description of Artificial Sequence:  Enzymatic Nucleic Acid
agcuaauggccgaaaggcgagugaggucuucuuccac

SEQ ID NO: 18694 - RNA, 37 nt, Artificial Sequence
  Description of Artificial Sequence:  Enzymatic Nucleic Acid
ugcgccaggccgaaaggcgagugaggucuuaaugcuc

SEQ ID NO: 18695 - RNA, 37 nt, Artificial Sequence
  Description of Artificial Sequence:  Enzymatic Nucleic Acid
aauaugcggccgaaaggcgagugaggucucagcuaau

SEQ ID NO: 18696 - RNA, 37 nt, Artificial Sequence
  Description of Artificial Sequence:  Enzymatic Nucleic Acid
uuaauauggccgaaaggcgagugaggucugccagcua

SEQ ID NO: 18697 - RNA, 37 nt, Artificial Sequence
  Description of Artificial Sequence:  Enzymatic Nucleic Acid
uuaaaguggccgaaaggcgagugaggucuuuaauaug

SEQ ID NO: 18698 - RNA, 37 nt, Artificial Sequence
  Description of Artificial Sequence:  Enzymatic Nucleic Acid
ucaaggaggccgaaaggcgagugaggucuuuaaagug

SEQ ID NO: 18699 - RNA, 37 nt, Artificial Sequence
  Description of Artificial Sequence:  Enzymatic Nucleic Acid
ccuuuuuagccgaaaggcgagugaggucuucaaggag

SEQ ID NO: 18700 - RNA, 37 nt, Artificial Sequence
  Description of Artificial Sequence:  Enzymatic Nucleic Acid
acauaccagccgaaaggcgagugaggucucuuuuuac

SEQ ID NO: 18701 - RNA, 37 nt, Artificial Sequence
  Description of Artificial Sequence:  Enzymatic Nucleic Acid
auuacauagccgaaaggcgagugaggucucaccuuuu

SEQ ID NO: 18702 - RNA, 37 nt, Artificial Sequence
  Description of Artificial Sequence:  Enzymatic Nucleic Acid
auaaauuagccgaaaggcgagugaggucuauaccacc

SEQ ID NO: 18703 - RNA, 37 nt, Artificial Sequence
  Description of Artificial Sequence:  Enzymatic Nucleic Acid
auaccuuggccgaaaggcgagugaggucuauaaauua

SEQ ID NO: 18704 - RNA, 37 nt, Artificial Sequence
  Description of Artificial Sequence:  Enzymatic Nucleic Acid
gagaaauagccgaaaggcgagugaggucucuugcaua

SEQ ID NO: 18705 - RNA, 37 nt, Artificial Sequence
  Description of Artificial Sequence:  Enzymatic Nucleic Acid
agucccaagccgaaaggcgagugaggucuuggagaaa

SEQ ID NO: 18706 - RNA, 37 nt, Artificial Sequence
  Description of Artificial Sequence:  Enzymatic Nucleic Acid
cucauuaagccgaaaggcgagugaggucuuaauaucc

SEQ ID NO: 18707 - RNA, 37 nt, Artificial Sequence
  Description of Artificial Sequence:  Enzymatic Nucleic Acid
agugaugggccgaaaggcgagugaggucuucauuaac

SEQ ID NO: 18708 - RNA, 37 nt, Artificial Sequence
  Description of Artificial Sequence:  Enzymatic Nucleic Acid
aaaauggggccgaaaggcgagugaggucuuuuucuuc

SEQ ID NO: 18709 - RNA, 37 nt, Artificial Sequence
  Description of Artificial Sequence:  Enzymatic Nucleic Acid
uuucaaaggccgaaaggcgagugaggucuaguugaaa

SEQ ID NO: 18710 - RNA, 37 nt, Artificial Sequence
  Description of Artificial Sequence:  Enzymatic Nucleic Acid
accccagggccgaaaggcgagugaggucuaaguuuca

SEQ ID NO: 18711 - RNA, 37 nt, Artificial Sequence
  Description of Artificial Sequence:  Enzymatic Nucleic Acid
ugcucagagccgaaaggcgagugaggucucccaggca

SEQ ID NO: 18712 - RNA, 37 nt, Artificial Sequence
  Description of Artificial Sequence:  Enzymatic Nucleic Acid
ccaucauggccgaaaggcgagugaggucuucagaccc

SEQ ID NO: 18713 - RNA, 37 nt, Artificial Sequence
  Description of Artificial Sequence:  Enzymatic Nucleic Acid
cuuuccuagccgaaaggcgagugaggucuccugucuc

SEQ ID NO: 18714 - RNA, 37 nt, Artificial Sequence
  Description of Artificial Sequence:  Enzymatic Nucleic Acid
aguaggcggccgaaaggcgagugaggucuccuuuccu

SEQ ID NO: 18715 - RNA, 37 nt, Artificial Sequence
  Description of Artificial Sequence:  Enzymatic Nucleic Acid
agaguagggccgaaaggcgagugaggucugcccuuuc

SEQ ID NO: 18716 - RNA, 37 nt, Artificial Sequence
  Description of Artificial Sequence:  Enzymatic Nucleic Acid
ucuuuagagccgaaaggcgagugaggucuccugaaga

SEQ ID NO: 18717 - RNA, 37 nt, Artificial Sequence
  Description of Artificial Sequence:  Enzymatic Nucleic Acid
aaggcccagccgaaaggcgagugaggucuuugaucuu

SEQ ID NO: 18718 - RNA, 37 nt, Artificial Sequence
  Description of Artificial Sequence:  Enzymatic Nucleic Acid
auccaagggccgaaaggcgagugaggucuccacuuga

SEQ ID NO: 18719 - RNA, 37 nt, Artificial Sequence
  Description of Artificial Sequence:  Enzymatic Nucleic Acid
cagcuuaggccgaaaggcgagugaggucugauccaag

SEQ ID NO: 18720 - RNA, 37 nt, Artificial Sequence
  Description of Artificial Sequence:  Enzymatic Nucleic Acid
agagccaggccgaaaggcgagugaggucuuuagcgau

SEQ ID NO: 18721 - RNA, 37 nt, Artificial Sequence
  Description of Artificial Sequence:  Enzymatic Nucleic Acid
aaacagaggccgaaaggcgagugaggucucagcuuag

SEQ ID NO: 18722 - RNA, 37 nt, Artificial Sequence
  Description of Artificial Sequence:  Enzymatic Nucleic Acid
gcaucaaagccgaaaggcgagugaggucuagagccag

SEQ ID NO: 18723 - RNA, 37 nt, Artificial Sequence
  Description of Artificial Sequence:  Enzymatic Nucleic Acid
auaaauaggccgaaaggcgagugaggucuaucaaaca

SEQ ID NO: 18724 - RNA, 37 nt, Artificial Sequence
  Description of Artificial Sequence:  Enzymatic Nucleic Acid
cuaacuuggccgaaaggcgagugaggucuauaaauag

SEQ ID NO: 18725 - RNA, 37 nt, Artificial Sequence
  Description of Artificial Sequence:  Enzymatic Nucleic Acid
gacccuaagccgaaaggcgagugaggucuuugcauaa

SEQ ID NO: 18726 - RNA, 37 nt, Artificial Sequence
  Description of Artificial Sequence:  Enzymatic Nucleic Acid
uacauagagccgaaaggcgagugaggucuccuaacuu

SEQ ID NO: 18727 - RNA, 37 nt, Artificial Sequence
  Description of Artificial Sequence:  Enzymatic Nucleic Acid
ccuaaauagccgaaaggcgagugaggucuauagaccc

SEQ ID NO: 18728 - RNA, 37 nt, Artificial Sequence
  Description of Artificial Sequence:  Enzymatic Nucleic Acid
aguaggcggccgaaaggcgagugaggucuauccuaaa

SEQ ID NO: 18729 - RNA, 37 nt, Artificial Sequence
  Description of Artificial Sequence:  Enzymatic Nucleic Acid
agaguagggccgaaaggcgagugaggucugcauccua

SEQ ID NO: 18730 - RNA, 37 nt, Artificial Sequence
  Description of Artificial Sequence:  Enzymatic Nucleic Acid
ggugcagagccgaaaggcgagugaggucuauccuaaa

SEQ ID NO: 18731 - RNA, 37 nt, Artificial Sequence
  Description of Artificial Sequence:  Enzymatic Nucleic Acid
agaagguggccgaaaggcgagugaggucuagacaucc

SEQ ID NO: 18732 - RNA, 37 nt, Artificial Sequence
  Description of Artificial Sequence:  Enzymatic Nucleic Acid
acuggcuggccgaaaggcgagugaggucuagaaggug

SEQ ID NO: 18733 - RNA, 37 nt, Artificial Sequence
  Description of Artificial Sequence:  Enzymatic Nucleic Acid
cugacugggccgaaaggcgagugaggucuugcagaag

SEQ ID NO: 18734 - RNA, 37 nt, Artificial Sequence
  Description of Artificial Sequence:  Enzymatic Nucleic Acid
gcuucugagccgaaaggcgagugaggucuuggcugca

SEQ ID NO: 18735 - RNA, 37 nt, Artificial Sequence
  Description of Artificial Sequence:  Enzymatic Nucleic Acid
cucuccaggccgaaaggcgagugaggucuuucugacu

SEQ ID NO: 18736 - RNA, 37 nt, Artificial Sequence
  Description of Artificial Sequence:  Enzymatic Nucleic Acid
cacuguuggccgaaaggcgagugaggucucucuccag

SEQ ID NO: 18737 - RNA, 37 nt, Artificial Sequence
  Description of Artificial Sequence:  Enzymatic Nucleic Acid
gcaauccagccgaaaggcgagugaggucuuguugccu

SEQ ID NO: 18738 - RNA, 37 nt, Artificial Sequence
  Description of Artificial Sequence:  Enzymatic Nucleic Acid
agaagcaggccgaaaggcgagugaggucuaauccacu

SEQ ID NO: 18739 - RNA, 37 nt, Artificial Sequence
  Description of Artificial Sequence:  Enzymatic Nucleic Acid
ccaagaaggccgaaaggcgagugaggucuagcaaucc

SEQ ID NO: 18740 - RNA, 37 nt, Artificial Sequence
  Description of Artificial Sequence:  Enzymatic Nucleic Acid
gaagcauagccgaaaggcgagugaggucuucuucucc

SEQ ID NO: 18741 - RNA, 37 nt, Artificial Sequence
  Description of Artificial Sequence:  Enzymatic Nucleic Acid
aaaggaaggccgaaaggcgagugaggucuauacucuu

SEQ ID NO: 18742 - RNA, 37 nt, Artificial Sequence
  Description of Artificial Sequence:  Enzymatic Nucleic Acid
uuaaauuagccgaaaggcgagugaggucuauggauaa

SEQ ID NO: 18743 - RNA, 37 nt, Artificial Sequence
  Description of Artificial Sequence:  Enzymatic Nucleic Acid
agguucuagccgaaaggcgagugaggucuaguuaaau

SEQ ID NO: 18744 - RNA, 37 nt, Artificial Sequence
  Description of Artificial Sequence:  Enzymatic Nucleic Acid
acuuagaggccgaaaggcgagugaggucuucagguuc

SEQ ID NO: 18745 - RNA, 37 nt, Artificial Sequence
  Description of Artificial Sequence:  Enzymatic Nucleic Acid
uucgguuagccgaaaggcgagugaggucuuuagagcu

SEQ ID NO: 18746 - RNA, 37 nt, Artificial Sequence
  Description of Artificial Sequence:  Enzymatic Nucleic Acid
gaggcauagccgaaaggcgagugaggucuauucuucg

SEQ ID NO: 18747 - RNA, 37 nt, Artificial Sequence
  Description of Artificial Sequence:  Enzymatic Nucleic Acid
aacagagggccgaaaggcgagugaggucuauacauuc

SEQ ID NO: 18748 - RNA, 37 nt, Artificial Sequence
  Description of Artificial Sequence:  Enzymatic Nucleic Acid
cauaagaagccgaaaggcgagugaggucuagaggcau

SEQ ID NO: 18749 - RNA, 37 nt, Artificial Sequence
  Description of Artificial Sequence:  Enzymatic Nucleic Acid
auguggcagccgaaaggcgagugaggucuauaagaac

SEQ ID NO: 18750 - RNA, 37 nt, Artificial Sequence
  Description of Artificial Sequence:  Enzymatic Nucleic Acid
ggaugugggccgaaaggcgagugaggucuacauaaga

SEQ ID NO: 18751 - RNA, 37 nt, Artificial Sequence
  Description of Artificial Sequence:  Enzymatic Nucleic Acid
ccuuuaaagccgaaaggcgagugaggucuaaggaugu

SEQ ID NO: 18752 - RNA, 37 nt, Artificial Sequence
  Description of Artificial Sequence:  Enzymatic Nucleic Acid
acagagaggccgaaaggcgagugaggucucuuuaaac

SEQ ID NO: 18753 - RNA, 37 nt, Artificial Sequence
  Description of Artificial Sequence:  Enzymatic Nucleic Acid
ucuucauagccgaaaggcgagugaggucuagagagcc

SEQ ID NO: 18754 - RNA, 37 nt, Artificial Sequence
  Description of Artificial Sequence:  Enzymatic Nucleic Acid
gcugaugagccgaaaggcgagugaggucuggucccau

SEQ ID NO: 18755 - RNA, 37 nt, Artificial Sequence
  Description of Artificial Sequence:  Enzymatic Nucleic Acid
ggaauguggccgaaaggcgagugaggucuugaugacg

SEQ ID NO: 18756 - RNA, 37 nt, Artificial Sequence
  Description of Artificial Sequence:  Enzymatic Nucleic Acid
uaggcucagccgaaaggcgagugaggucuuagggaau

SEQ ID NO: 18757 - RNA, 37 nt, Artificial Sequence
  Description of Artificial Sequence:  Enzymatic Nucleic Acid
ccaguagggccgaaaggcgagugaggucuucacuagg

SEQ ID NO: 18758 - RNA, 37 nt, Artificial Sequence
  Description of Artificial Sequence:  Enzymatic Nucleic Acid
gccaggaggccgaaaggcgagugaggucucaguaggc

SEQ ID NO: 18759 - RNA, 37 nt, Artificial Sequence
  Description of Artificial Sequence:  Enzymatic Nucleic Acid
agccgcuggccgaaaggcgagugaggucucaggagcc

SEQ ID NO: 18760 - RNA, 37 nt, Artificial Sequence
  Description of Artificial Sequence:  Enzymatic Nucleic Acid
aaaagccggccgaaaggcgagugaggucuugccagga

SEQ ID NO: 18761 - RNA, 37 nt, Artificial Sequence
  Description of Artificial Sequence:  Enzymatic Nucleic Acid
cacaaaaggccgaaaggcgagugaggucucgcugcca

SEQ ID NO: 18762 - RNA, 37 nt, Artificial Sequence
  Description of Artificial Sequence:  Enzymatic Nucleic Acid
gucuuccagccgaaaggcgagugaggucuaaaagccg

SEQ ID NO: 18763 - RNA, 37 nt, Artificial Sequence
  Description of Artificial Sequence:  Enzymatic Nucleic Acid
ucuucugggccgaaaggcgagugaggucuuagugagu

SEQ ID NO: 18764 - RNA, 37 nt, Artificial Sequence
  Description of Artificial Sequence:  Enzymatic Nucleic Acid
cugucccagccgaaaggcgagugaggucuuccucucu

SEQ ID NO: 18765 - RNA, 37 nt, Artificial Sequence
  Description of Artificial Sequence:  Enzymatic Nucleic Acid
ggagaggagccgaaaggcgagugaggucuugucccac

SEQ ID NO: 18766 - RNA, 37 nt, Artificial Sequence
  Description of Artificial Sequence:  Enzymatic Nucleic Acid
cuagccuggccgaaaggcgagugaggucuuuuuguuu

SEQ ID NO: 18767 - RNA, 37 nt, Artificial Sequence
  Description of Artificial Sequence:  Enzymatic Nucleic Acid
ggcucuaggccgaaaggcgagugaggucucugcuuuu

SEQ ID NO: 18768 - RNA, 37 nt, Artificial Sequence
  Description of Artificial Sequence:  Enzymatic Nucleic Acid
ucuucugggccgaaaggcgagugaggucuucuagccu

SEQ ID NO: 18769 - RNA, 37 nt, Artificial Sequence
  Description of Artificial Sequence:  Enzymatic Nucleic Acid
aggaacaagccgaaaggcgagugaggucuaaagauuu

SEQ ID NO: 18770 - RNA, 37 nt, Artificial Sequence
  Description of Artificial Sequence:  Enzymatic Nucleic Acid
aagaggaagccgaaaggcgagugaggucuaacaaaga

SEQ ID NO: 18771 - RNA, 37 nt, Artificial Sequence
  Description of Artificial Sequence:  Enzymatic Nucleic Acid
gugguuuggccgaaaggcgagugaggucuguaugugu

SEQ ID NO: 18772 - RNA, 37 nt, Artificial Sequence
  Description of Artificial Sequence:  Enzymatic Nucleic Acid
agcugucagccgaaaggcgagugaggucuaggugguu

SEQ ID NO: 18773 - RNA, 37 nt, Artificial Sequence
  Description of Artificial Sequence:  Enzymatic Nucleic Acid
auugccaggccgaaaggcgagugaggucuugucacag

SEQ ID NO: 18774 - RNA, 37 nt, Artificial Sequence
  Description of Artificial Sequence:  Enzymatic Nucleic Acid
uaaaauuggccgaaaggcgagugaggucucagcuguc

SEQ ID NO: 18775 - RNA, 37 nt, Artificial Sequence
  Description of Artificial Sequence:  Enzymatic Nucleic Acid
uccaguuagccgaaaggcgagugaggucucugauuua

SEQ ID NO: 18776 - RNA, 37 nt, Artificial Sequence
  Description of Artificial Sequence:  Enzymatic Nucleic Acid
gaguuuaagccgaaaggcgagugaggucucuccuucc

SEQ ID NO: 18777 - RNA, 37 nt, Artificial Sequence
  Description of Artificial Sequence:  Enzymatic Nucleic Acid
agaauugagccgaaaggcgagugaggucuugaggucu

SEQ ID NO: 18778 - RNA, 37 nt, Artificial Sequence
  Description of Artificial Sequence:  Enzymatic Nucleic Acid
uugcuggggccgaaaggcgagugaggucuuauuaucu

SEQ ID NO: 18779 - RNA, 37 nt, Artificial Sequence
  Description of Artificial Sequence:  Enzymatic Nucleic Acid
acuauuuggccgaaaggcgagugaggucuugggcuau

SEQ ID NO: 18780 - RNA, 37 nt, Artificial Sequence
  Description of Artificial Sequence:  Enzymatic Nucleic Acid
uguuaucagccgaaaggcgagugaggucuuauuugcu

SEQ ID NO: 18781 - RNA, 37 nt, Artificial Sequence
  Description of Artificial Sequence:  Enzymatic Nucleic Acid
augaacaggccgaaaggcgagugaggucuuaagguuu

SEQ ID NO: 18782 - RNA, 37 nt, Artificial Sequence
  Description of Artificial Sequence:  Enzymatic Nucleic Acid
gacaugaagccgaaaggcgagugaggucuagcuaagg

SEQ ID NO: 18783 - RNA, 37 nt, Artificial Sequence
  Description of Artificial Sequence:  Enzymatic Nucleic Acid
aaucaagagccgaaaggcgagugaggucuaugaacag

SEQ ID NO: 18784 - RNA, 37 nt, Artificial Sequence
  Description of Artificial Sequence:  Enzymatic Nucleic Acid
ugguuuuggccgaaaggcgagugaggucuuuuucucu

SEQ ID NO: 18785 - RNA, 37 nt, Artificial Sequence
  Description of Artificial Sequence:  Enzymatic Nucleic Acid
cugaguaagccgaaaggcgagugaggucuaauucuaa

SEQ ID NO: 18786 - RNA, 37 nt, Artificial Sequence
  Description of Artificial Sequence:  Enzymatic Nucleic Acid
ugaaggaggccgaaaggcgagugaggucuugaguaac

SEQ ID NO: 18787 - RNA, 37 nt, Artificial Sequence
  Description of Artificial Sequence:  Enzymatic Nucleic Acid
gcuacaaagccgaaaggcgagugaggucucugaguuu

SEQ ID NO: 18788 - RNA, 37 nt, Artificial Sequence
  Description of Artificial Sequence:  Enzymatic Nucleic Acid
guaugcuagccgaaaggcgagugaggucuaaaccuga

SEQ ID NO: 18789 - RNA, 37 nt, Artificial Sequence
  Description of Artificial Sequence:  Enzymatic Nucleic Acid
cauguauggccgaaaggcgagugaggucuuacaaacc

SEQ ID NO: 18790 - RNA, 37 nt, Artificial Sequence
  Description of Artificial Sequence:  Enzymatic Nucleic Acid
uggauggagccgaaaggcgagugaggucuucauguau

SEQ ID NO: 18791 - RNA, 37 nt, Artificial Sequence
  Description of Artificial Sequence:  Enzymatic Nucleic Acid
uucuuugagccgaaaggcgagugaggucuugauggau

SEQ ID NO: 18792 - RNA, 37 nt, Artificial Sequence
  Description of Artificial Sequence:  Enzymatic Nucleic Acid
agauggaagccgaaaggcgagugaggucucauucuuu

SEQ ID NO: 18793 - RNA, 37 nt, Artificial Sequence
  Description of Artificial Sequence:  Enzymatic Nucleic Acid
cauuaagagccgaaaggcgagugaggucuuccagaug

SEQ ID NO: 18794 - RNA, 37 nt, Artificial Sequence
  Description of Artificial Sequence:  Enzymatic Nucleic Acid
ucuuucuagccgaaaggcgagugaggucuauuaagac

SEQ ID NO: 18795 - RNA, 37 nt, Artificial Sequence
  Description of Artificial Sequence:  Enzymatic Nucleic Acid
cauuauuagccgaaaggcgagugaggucuaagucucc

SEQ ID NO: 18796 - RNA, 37 nt, Artificial Sequence
  Description of Artificial Sequence:  Enzymatic Nucleic Acid
guaacuaggccgaaaggcgagugaggucuucauuauu

SEQ ID NO: 18797 - RNA, 37 nt, Artificial Sequence
  Description of Artificial Sequence:  Enzymatic Nucleic Acid
cuuuguaagccgaaaggcgagugaggucuuagcucau

SEQ ID NO: 18798 - RNA, 37 nt, Artificial Sequence
  Description of Artificial Sequence:  Enzymatic Nucleic Acid
aacaagcagccgaaaggcgagugaggucuuuuguaac

SEQ ID NO: 18799 - RNA, 37 nt, Artificial Sequence
  Description of Artificial Sequence:  Enzymatic Nucleic Acid
ugaacaaggccgaaaggcgagugaggucuacuuugua

SEQ ID NO: 18800 - RNA, 37 nt, Artificial Sequence
  Description of Artificial Sequence:  Enzymatic Nucleic Acid
uuaaugaagccgaaaggcgagugaggucuaagcacuu

SEQ ID NO: 18801 - RNA, 37 nt, Artificial Sequence
  Description of Artificial Sequence:  Enzymatic Nucleic Acid
uuucaguggccgaaaggcgagugaggucuuauuuuaa

SEQ ID NO: 18802 - RNA, 37 nt, Artificial Sequence
  Description of Artificial Sequence:  Enzymatic Nucleic Acid
auaaaugggccgaaaggcgagugaggucuaaaugauu

SEQ ID NO: 18803 - RNA, 37 nt, Artificial Sequence
  Description of Artificial Sequence:  Enzymatic Nucleic Acid
agugccaagccgaaaggcgagugaggucucauuuuug

SEQ ID NO: 18804 - RNA, 37 nt, Artificial Sequence
  Description of Artificial Sequence:  Enzymatic Nucleic Acid
uguuaguggccgaaaggcgagugaggucucaaccauu

SEQ ID NO: 18805 - RNA, 37 nt, Artificial Sequence
  Description of Artificial Sequence:  Enzymatic Nucleic Acid
aggaaguggccgaaaggcgagugaggucuucguucuu

SEQ ID NO: 18806 - RNA, 37 nt, Artificial Sequence
  Description of Artificial Sequence:  Enzymatic Nucleic Acid
cucagaaagccgaaaggcgagugaggucuucugaaag

SEQ ID NO: 18807 - RNA, 37 nt, Artificial Sequence
  Description of Artificial Sequence:  Enzymatic Nucleic Acid
uccacguagccgaaaggcgagugaggucuauuaucuc

SEQ ID NO: 18808 - RNA, 37 nt, Artificial Sequence
  Description of Artificial Sequence:  Enzymatic Nucleic Acid
cuguuccagccgaaaggcgagugaggucuguacauua

SEQ ID NO: 18809 - RNA, 37 nt, Artificial Sequence
  Description of Artificial Sequence:  Enzymatic Nucleic Acid
cacccagagccgaaaggcgagugaggucuuguuccac

SEQ ID NO: 18810 - RNA, 37 nt, Artificial Sequence
  Description of Artificial Sequence:  Enzymatic Nucleic Acid
ccauuccagccgaaaggcgagugaggucuccagacug

SEQ ID NO: 18811 - RNA, 37 nt, Artificial Sequence
  Description of Artificial Sequence:  Enzymatic Nucleic Acid
gguuucaggccgaaaggcgagugaggucucccauucc

SEQ ID NO: 18812 - RNA, 37 nt, Artificial Sequence
  Description of Artificial Sequence:  Enzymatic Nucleic Acid
gacuugcagccgaaaggcgagugaggucuaugguuuc

SEQ ID NO: 18813 - RNA, 37 nt, Artificial Sequence
  Description of Artificial Sequence:  Enzymatic Nucleic Acid
cagacuuggccgaaaggcgagugaggucuacaugguu

SEQ ID NO: 18814 - RNA, 37 nt, Artificial Sequence
  Description of Artificial Sequence:  Enzymatic Nucleic Acid
gacacagagccgaaaggcgagugaggucuuugcacau

SEQ ID NO: 18815 - RNA, 37 nt, Artificial Sequence
  Description of Artificial Sequence:  Enzymatic Nucleic Acid
acaagacagccgaaaggcgagugaggucuagacuugc

SEQ ID NO: 18816 - RNA, 37 nt, Artificial Sequence
  Description of Artificial Sequence:  Enzymatic Nucleic Acid
ugacaagagccgaaaggcgagugaggucuacagacuu

SEQ ID NO: 18817 - RNA, 37 nt, Artificial Sequence
  Description of Artificial Sequence:  Enzymatic Nucleic Acid
uggacugagccgaaaggcgagugaggucuaagacaca

SEQ ID NO: 18818 - RNA, 37 nt, Artificial Sequence
  Description of Artificial Sequence:  Enzymatic Nucleic Acid
uucuuggagccgaaaggcgagugaggucuugacaaga

SEQ ID NO: 18819 - RNA, 37 nt, Artificial Sequence
  Description of Artificial Sequence:  Enzymatic Nucleic Acid
cggugucagccgaaaggcgagugaggucuuucuugga

SEQ ID NO: 18820 - RNA, 37 nt, Artificial Sequence
  Description of Artificial Sequence:  Enzymatic Nucleic Acid
aaaauuaagccgaaaggcgagugaggucuaucucggu

SEQ ID NO: 18821 - RNA, 37 nt, Artificial Sequence
  Description of Artificial Sequence:  Enzymatic Nucleic Acid
acaaggcagccgaaaggcgagugaggucugggucccu

SEQ ID NO: 18822 - RNA, 37 nt, Artificial Sequence
  Description of Artificial Sequence:  Enzymatic Nucleic Acid
aaacaagggccgaaaggcgagugaggucuacgggucc

SEQ ID NO: 18823 - RNA, 37 nt, Artificial Sequence
  Description of Artificial Sequence:  Enzymatic Nucleic Acid
cuaggaaagccgaaaggcgagugaggucuaaggcacg

SEQ ID NO: 18824 - RNA, 37 nt, Artificial Sequence
  Description of Artificial Sequence:  Enzymatic Nucleic Acid
cuuguggggccgaaaggcgagugaggucuuaggaaac

SEQ ID NO: 18825 - RNA, 37 nt, Artificial Sequence
  Description of Artificial Sequence:  Enzymatic Nucleic Acid
gauguuuggccgaaaggcgagugaggucuauucuugu

SEQ ID NO: 18826 - RNA, 37 nt, Artificial Sequence
  Description of Artificial Sequence:  Enzymatic Nucleic Acid
gaggcuaggccgaaaggcgagugaggucugaguaucu

SEQ ID NO: 18827 - RNA, 37 nt, Artificial Sequence
  Description of Artificial Sequence:  Enzymatic Nucleic Acid
aaaugagggccgaaaggcgagugaggucuuagcgagu

SEQ ID NO: 18828 - RNA, 37 nt, Artificial Sequence
  Description of Artificial Sequence:  Enzymatic Nucleic Acid
aagaugcagccgaaaggcgagugaggucuuccuccuu

SEQ ID NO: 18829 - RNA, 37 nt, Artificial Sequence
  Description of Artificial Sequence:  Enzymatic Nucleic Acid
caaagauggccgaaaggcgagugaggucuacuccucc

SEQ ID NO: 18830 - RNA, 37 nt, Artificial Sequence
  Description of Artificial Sequence:  Enzymatic Nucleic Acid
acugucgggccgaaaggcgagugaggucucaaagaug

SEQ ID NO: 18831 - RNA, 37 nt, Artificial Sequence
  Description of Artificial Sequence:  Enzymatic Nucleic Acid
uuacaccagccgaaaggcgagugaggucuugucggcc

SEQ ID NO: 18832 - RNA, 37 nt, Artificial Sequence
  Description of Artificial Sequence:  Enzymatic Nucleic Acid
caguuacagccgaaaggcgagugaggucucacugucg

SEQ ID NO: 18833 - RNA, 37 nt, Artificial Sequence
  Description of Artificial Sequence:  Enzymatic Nucleic Acid
cacaguuagccgaaaggcgagugaggucuaccacugu

SEQ ID NO: 18834 - RNA, 37 nt, Artificial Sequence
  Description of Artificial Sequence:  Enzymatic Nucleic Acid
cacacacagccgaaaggcgagugaggucuaguuacac

SEQ ID NO: 18835 - RNA, 37 nt, Artificial Sequence
  Description of Artificial Sequence:  Enzymatic Nucleic Acid
cacacacagccgaaaggcgagugaggucuacaguuac

SEQ ID NO: 18836 - RNA, 37 nt, Artificial Sequence
  Description of Artificial Sequence:  Enzymatic Nucleic Acid
cacacacagccgaaaggcgagugaggucuacacaguu

SEQ ID NO: 18837 - RNA, 37 nt, Artificial Sequence
  Description of Artificial Sequence:  Enzymatic Nucleic Acid
cacacacagccgaaaggcgagugaggucuacacacag

SEQ ID NO: 18838 - RNA, 37 nt, Artificial Sequence
  Description of Artificial Sequence:  Enzymatic Nucleic Acid
cacacacagccgaaaggcgagugaggucuacacacac

SEQ ID NO: 18839 - RNA, 37 nt, Artificial Sequence
  Description of Artificial Sequence:  Enzymatic Nucleic Acid
cccacacagccgaaaggcgagugaggucuacacacac

SEQ ID NO: 18840 - RNA, 37 nt, Artificial Sequence
  Description of Artificial Sequence:  Enzymatic Nucleic Acid
cacccacagccgaaaggcgagugaggucuacacacac

SEQ ID NO: 18841 - RNA, 37 nt, Artificial Sequence
  Description of Artificial Sequence:  Enzymatic Nucleic Acid
cacacccagccgaaaggcgagugaggucuacacacac

SEQ ID NO: 18842 - RNA, 37 nt, Artificial Sequence
  Description of Artificial Sequence:  Enzymatic Nucleic Acid
cacccacagccgaaaggcgagugaggucuccacacac

SEQ ID NO: 18843 - RNA, 37 nt, Artificial Sequence
  Description of Artificial Sequence:  Enzymatic Nucleic Acid
uacacccagccgaaaggcgagugaggucuacccacac

SEQ ID NO: 18844 - RNA, 37 nt, Artificial Sequence
  Description of Artificial Sequence:  Enzymatic Nucleic Acid
cacauacagccgaaaggcgagugaggucuccacaccc

SEQ ID NO: 18845 - RNA, 37 nt, Artificial Sequence
  Description of Artificial Sequence:  Enzymatic Nucleic Acid
cacacauagccgaaaggcgagugaggucuacccacac

SEQ ID NO: 18846 - RNA, 37 nt, Artificial Sequence
  Description of Artificial Sequence:  Enzymatic Nucleic Acid
aaaacacagccgaaaggcgagugaggucuauacaccc

SEQ ID NO: 18847 - RNA, 37 nt, Artificial Sequence
  Description of Artificial Sequence:  Enzymatic Nucleic Acid
acaaaacagccgaaaggcgagugaggucuacauacac

SEQ ID NO: 18848 - RNA, 37 nt, Artificial Sequence
  Description of Artificial Sequence:  Enzymatic Nucleic Acid
gcacaaaagccgaaaggcgagugaggucuacacauac

SEQ ID NO: 18849 - RNA, 37 nt, Artificial Sequence
  Description of Artificial Sequence:  Enzymatic Nucleic Acid
guuaugcagccgaaaggcgagugaggucuaaaacaca

SEQ ID NO: 18850 - RNA, 37 nt, Artificial Sequence
  Description of Artificial Sequence:  Enzymatic Nucleic Acid
uaguuauggccgaaaggcgagugaggucuacaaaaca

SEQ ID NO: 18851 - RNA, 37 nt, Artificial Sequence
  Description of Artificial Sequence:  Enzymatic Nucleic Acid
aaaaguaagccgaaaggcgagugaggucuuuuaaaau

SEQ ID NO: 18852 - RNA, 37 nt, Artificial Sequence
  Description of Artificial Sequence:  Enzymatic Nucleic Acid
aucuguaggccgaaaggcgagugaggucuauauauuc

SEQ ID NO: 18853 - RNA, 37 nt, Artificial Sequence
  Description of Artificial Sequence:  Enzymatic Nucleic Acid
ggaccaaagccgaaaggcgagugaggucucaugucug

SEQ ID NO: 18854 - RNA, 37 nt, Artificial Sequence
  Description of Artificial Sequence:  Enzymatic Nucleic Acid
auauaggagccgaaaggcgagugaggucucaaaccau

SEQ ID NO: 18855 - RNA, 37 nt, Artificial Sequence
  Description of Artificial Sequence:  Enzymatic Nucleic Acid
caucaugagccgaaaggcgagugaggucuuagaaaua

SEQ ID NO: 18856 - RNA, 37 nt, Artificial Sequence
  Description of Artificial Sequence:  Enzymatic Nucleic Acid
acaaaauagccgaaaggcgagugaggucuauucauca

SEQ ID NO: 18857 - RNA, 37 nt, Artificial Sequence
  Description of Artificial Sequence:  Enzymatic Nucleic Acid
augguauagccgaaaggcgagugaggucuaaaauaca

SEQ ID NO: 18858 - RNA, 37 nt, Artificial Sequence
  Description of Artificial Sequence:  Enzymatic Nucleic Acid
uacgauuagccgaaaggcgagugaggucuaaauccca

SEQ ID NO: 18859 - RNA, 37 nt, Artificial Sequence
  Description of Artificial Sequence:  Enzymatic Nucleic Acid
aguugguagccgaaaggcgagugaggucugauuacaa

SEQ ID NO: 18860 - RNA, 37 nt, Artificial Sequence
  Description of Artificial Sequence:  Enzymatic Nucleic Acid
agcaguuggccgaaaggcgagugaggucucaaguuua

SEQ ID NO: 18861 - RNA, 37 nt, Artificial Sequence
  Description of Artificial Sequence:  Enzymatic Nucleic Acid
cauaaaaggccgaaaggcgagugaggucuaguugcca

SEQ ID NO: 18862 - RNA, 37 nt, Artificial Sequence
  Description of Artificial Sequence:  Enzymatic Nucleic Acid
agacagaagccgaaaggcgagugaggucuauaaaagc

SEQ ID NO: 18863 - RNA, 37 nt, Artificial Sequence
  Description of Artificial Sequence:  Enzymatic Nucleic Acid
gaaggagagccgaaaggcgagugaggucuagaacaua

SEQ ID NO: 18864 - RNA, 37 nt, Artificial Sequence
  Description of Artificial Sequence:  Enzymatic Nucleic Acid
aaaaagaggccgaaaggcgagugaggucuuuuuucuu

SEQ ID NO: 18865 - RNA, 37 nt, Artificial Sequence
  Description of Artificial Sequence:  Enzymatic Nucleic Acid
gcucuaaagccgaaaggcgagugaggucuaaggauaa

SEQ ID NO: 18866 - RNA, 37 nt, Artificial Sequence
  Description of Artificial Sequence:  Enzymatic Nucleic Acid
uuucucuggccgaaaggcgagugaggucuucuaaaca

SEQ ID NO: 18867 - RNA, 37 nt, Artificial Sequence
  Description of Artificial Sequence:  Enzymatic Nucleic Acid
uuuugagagccgaaaggcgagugaggucucauuucaa

SEQ ID NO: 18868 - RNA, 37 nt, Artificial Sequence
  Description of Artificial Sequence:  Enzymatic Nucleic Acid
auauuuaggccgaaaggcgagugaggucuaauuuuuu

SEQ ID NO: 18869 - RNA, 37 nt, Artificial Sequence
  Description of Artificial Sequence:  Enzymatic Nucleic Acid
uaaacuaagccgaaaggcgagugaggucuauuuaguu

SEQ ID NO: 18870 - RNA, 37 nt, Artificial Sequence
  Description of Artificial Sequence:  Enzymatic Nucleic Acid
cagcuaaagccgaaaggcgagugaggucuuaacauuu

SEQ ID NO: 18871 - RNA, 37 nt, Artificial Sequence
  Description of Artificial Sequence:  Enzymatic Nucleic Acid
acaaucaggccgaaaggcgagugaggucuuaaacuaa

SEQ ID NO: 18872 - RNA, 37 nt, Artificial Sequence
  Description of Artificial Sequence:  Enzymatic Nucleic Acid
accccauagccgaaaggcgagugaggucuaaucagcu

SEQ ID NO: 18873 - RNA, 37 nt, Artificial Sequence
  Description of Artificial Sequence:  Enzymatic Nucleic Acid
uucgaaaagccgaaaggcgagugaggucucccauaca

SEQ ID NO: 18874 - RNA, 37 nt, Artificial Sequence
  Description of Artificial Sequence:  Enzymatic Nucleic Acid
aaaacaaagccgaaaggcgagugaggucuaaaaagug

SEQ ID NO: 18875 - RNA, 37 nt, Artificial Sequence
  Description of Artificial Sequence:  Enzymatic Nucleic Acid
agguaaaagccgaaaggcgagugaggucuaaacaaaa

SEQ ID NO: 18876 - RNA, 37 nt, Artificial Sequence
  Description of Artificial Sequence:  Enzymatic Nucleic Acid
aauuuacagccgaaaggcgagugaggucuaguuguga

SEQ ID NO: 18877 - RNA, 37 nt, Artificial Sequence
  Description of Artificial Sequence:  Enzymatic Nucleic Acid
gcaauuuagccgaaaggcgagugaggucuacaguugu

SEQ ID NO: 18878 - RNA, 37 nt, Artificial Sequence
  Description of Artificial Sequence:  Enzymatic Nucleic Acid
auuauugggccgaaaggcgagugaggucuaauuuaca

SEQ ID NO: 18879 - RNA, 37 nt, Artificial Sequence
  Description of Artificial Sequence:  Enzymatic Nucleic Acid
uucauggagccgaaaggcgagugaggucuaggaauua

SEQ ID NO: 18880 - RNA, 37 nt, Artificial Sequence
  Description of Artificial Sequence:  Enzymatic Nucleic Acid
auaauuuggccgaaaggcgagugaggucuauuuucau

SEQ ID NO: 18881 - RNA, 37 nt, Artificial Sequence
  Description of Artificial Sequence:  Enzymatic Nucleic Acid
uaucuacagccgaaaggcgagugaggucuuggauaau

SEQ ID NO: 18882 - RNA, 37 nt, Artificial Sequence
  Description of Artificial Sequence:  Enzymatic Nucleic Acid
uauaucuagccgaaaggcgagugaggucuacuggaua

SEQ ID NO: 18883 - RNA, 37 nt, Artificial Sequence
  Description of Artificial Sequence:  Enzymatic Nucleic Acid
aaaacuaggccgaaaggcgagugaggucucaauaucc

SEQ ID NO: 18884 - RNA, 37 nt, Artificial Sequence
  Description of Artificial Sequence:  Enzymatic Nucleic Acid
aggcaaaagccgaaaggcgagugaggucuuagccaau

SEQ ID NO: 18885 - RNA, 37 nt, Artificial Sequence
  Description of Artificial Sequence:  Enzymatic Nucleic Acid
aauaaagggccgaaaggcgagugaggucuaaaacuag

SEQ ID NO: 18886 - RNA, 37 nt, Artificial Sequence
  Description of Artificial Sequence:  Enzymatic Nucleic Acid
ugaauuuggccgaaaggcgagugaggucuuuaauaaa

SEQ ID NO: 18887 - RNA, 37 nt, Artificial Sequence
  Description of Artificial Sequence:  Enzymatic Nucleic Acid
cauucagggccgaaaggcgagugaggucuugaaauga

SEQ ID NO: 18888 - RNA, 37 nt, Artificial Sequence
  Description of Artificial Sequence:  Enzymatic Nucleic Acid
uaggcagagccgaaaggcgagugaggucuauucaggc

SEQ ID NO: 18889 - RNA, 37 nt, Artificial Sequence
  Description of Artificial Sequence:  Enzymatic Nucleic Acid
uauauagggccgaaaggcgagugaggucuagacauuc

SEQ ID NO: 18890 - RNA, 37 nt, Artificial Sequence
  Description of Artificial Sequence:  Enzymatic Nucleic Acid
acaaagaggccgaaaggcgagugaggucuagagaaua

SEQ ID NO: 18891 - RNA, 37 nt, Artificial Sequence
  Description of Artificial Sequence:  Enzymatic Nucleic Acid
ggagaauagccgaaaggcgagugaggucuaaagagca

SEQ ID NO: 18892 - RNA, 37 nt, Artificial Sequence
  Description of Artificial Sequence:  Enzymatic Nucleic Acid
uguuuuaagccgaaaggcgagugaggucuggguucaa

SEQ ID NO: 18893 - RNA, 37 nt, Artificial Sequence
  Description of Artificial Sequence:  Enzymatic Nucleic Acid
gagugccagccgaaaggcgagugaggucuaggauguu

SEQ ID NO: 18894 - DNA, 31 bp, Artificial Sequence
  Description of Artificial Sequence:  Enzymatic Nucleic Acid
tcccggggggctagctacaacgacccgggac

SEQ ID NO: 18895 - DNA, 31 bp, Artificial Sequence
  Description of Artificial Sequence:  Enzymatic Nucleic Acid
actgaccgggctagctacaacgatctcccgg

SEQ ID NO: 18896 - DNA, 31 bp, Artificial Sequence
  Description of Artificial Sequence:  Enzymatic Nucleic Acid
cacactgaggctagctacaacgacgctctcc

SEQ ID NO: 18897 - DNA, 31 bp, Artificial Sequence
  Description of Artificial Sequence:  Enzymatic Nucleic Acid
accacacaggctagctacaacgatgaccgct

SEQ ID NO: 18898 - DNA, 31 bp, Artificial Sequence
  Description of Artificial Sequence:  Enzymatic Nucleic Acid
cgaccacaggctagctacaacgaactgaccg

SEQ ID NO: 18899 - DNA, 31 bp, Artificial Sequence
  Description of Artificial Sequence:  Enzymatic Nucleic Acid
agcgaccaggctagctacaacgaacactgac

SEQ ID NO: 18900 - DNA, 31 bp, Artificial Sequence
  Description of Artificial Sequence:  Enzymatic Nucleic Acid
cgcagcgaggctagctacaacgacacacact

SEQ ID NO: 18901 - DNA, 31 bp, Artificial Sequence
  Description of Artificial Sequence:  Enzymatic Nucleic Acid
aaacgcagggctagctacaacgagaccacac

SEQ ID NO: 18902 - DNA, 31 bp, Artificial Sequence
  Description of Artificial Sequence:  Enzymatic Nucleic Acid
aggaaacgggctagctacaacgaagcgacca

SEQ ID NO: 18903 - DNA, 31 bp, Artificial Sequence
  Description of Artificial Sequence:  Enzymatic Nucleic Acid
agaggaaaggctagctacaacgagcagcgac

SEQ ID NO: 18904 - DNA, 31 bp, Artificial Sequence
  Description of Artificial Sequence:  Enzymatic Nucleic Acid
ggcgcaggggctagctacaacgaagaggaaa

SEQ ID NO: 18905 - DNA, 31 bp, Artificial Sequence
  Description of Artificial Sequence:  Enzymatic Nucleic Acid
gcccggcgggctagctacaacgaaggcagag

SEQ ID NO: 18906 - DNA, 31 bp, Artificial Sequence
  Description of Artificial Sequence:  Enzymatic Nucleic Acid
atgcccggggctagctacaacgagcaggcag

SEQ ID NO: 18907 - DNA, 31 bp, Artificial Sequence
  Description of Artificial Sequence:  Enzymatic Nucleic Acid
aagtgatgggctagctacaacgaccggcgca

SEQ ID NO: 18908 - DNA, 31 bp, Artificial Sequence
  Description of Artificial Sequence:  Enzymatic Nucleic Acid
gcaagtgaggctagctacaacgagcccggcg

SEQ ID NO: 18909 - DNA, 31 bp, Artificial Sequence
  Description of Artificial Sequence:  Enzymatic Nucleic Acid
cgcgcaagggctagctacaacgagatgcccg

SEQ ID NO: 18910 - DNA, 31 bp, Artificial Sequence
  Description of Artificial Sequence:  Enzymatic Nucleic Acid
gcggcgcgggctagctacaacgaaagtgatg

SEQ ID NO: 18911 - DNA, 31 bp, Artificial Sequence
  Description of Artificial Sequence:  Enzymatic Nucleic Acid
ctgcggcgggctagctacaacgagcaagtga

SEQ ID NO: 18912 - DNA, 31 bp, Artificial Sequence
  Description of Artificial Sequence:  Enzymatic Nucleic Acid
ttctgcggggctagctacaacgagcgcaagt

SEQ ID NO: 18913 - DNA, 31 bp, Artificial Sequence
  Description of Artificial Sequence:  Enzymatic Nucleic Acid
actttctgggctagctacaacgaggcgcgca

SEQ ID NO: 18914 - DNA, 31 bp, Artificial Sequence
  Description of Artificial Sequence:  Enzymatic Nucleic Acid
cagacggaggctagctacaacgatttctgcg

SEQ ID NO: 18915 - DNA, 31 bp, Artificial Sequence
  Description of Artificial Sequence:  Enzymatic Nucleic Acid
ctgccagaggctagctacaacgaggactttc

SEQ ID NO: 18916 - DNA, 31 bp, Artificial Sequence
  Description of Artificial Sequence:  Enzymatic Nucleic Acid
ccaggctgggctagctacaacgacagacgga

SEQ ID NO: 18917 - DNA, 31 bp, Artificial Sequence
  Description of Artificial Sequence:  Enzymatic Nucleic Acid
tatccaggggctagctacaacgatgccagac

SEQ ID NO: 18918 - DNA, 31 bp, Artificial Sequence
  Description of Artificial Sequence:  Enzymatic Nucleic Acid
agaggataggctagctacaacgaccaggctg

SEQ ID NO: 18919 - DNA, 31 bp, Artificial Sequence
  Description of Artificial Sequence:  Enzymatic Nucleic Acid
ggagaggaggctagctacaacgaatccaggc

SEQ ID NO: 18920 - DNA, 31 bp, Artificial Sequence
  Description of Artificial Sequence:  Enzymatic Nucleic Acid
ggtgccggggctagctacaacgaaggagagg

SEQ ID NO: 18921 - DNA, 31 bp, Artificial Sequence
  Description of Artificial Sequence:  Enzymatic Nucleic Acid
tgcgggtgggctagctacaacgacggtagga

SEQ ID NO: 18922 - DNA, 31 bp, Artificial Sequence
  Description of Artificial Sequence:  Enzymatic Nucleic Acid
tctgcgggggctagctacaacgagccggtag

SEQ ID NO: 18923 - DNA, 31 bp, Artificial Sequence
  Description of Artificial Sequence:  Enzymatic Nucleic Acid
ggcgtctgggctagctacaacgagggtgccg

SEQ ID NO: 18924 - DNA, 31 bp, Artificial Sequence
  Description of Artificial Sequence:  Enzymatic Nucleic Acid
caggggcgggctagctacaacgactgcgggt

SEQ ID NO: 18925 - DNA, 31 bp, Artificial Sequence
  Description of Artificial Sequence:  Enzymatic Nucleic Acid
tgcaggggggctagctacaacgagtctgcgg

SEQ ID NO: 18926 - DNA, 31 bp, Artificial Sequence
  Description of Artificial Sequence:  Enzymatic Nucleic Acid
ggcggctgggctagctacaacgaaggggcgt

SEQ ID NO: 18927 - DNA, 31 bp, Artificial Sequence
  Description of Artificial Sequence:  Enzymatic Nucleic Acid
accggcggggctagctacaacgatgcagggg

SEQ ID NO: 18928 - DNA, 31 bp, Artificial Sequence
  Description of Artificial Sequence:  Enzymatic Nucleic Acid
ccgaccggggctagctacaacgaggctgcag

SEQ ID NO: 18929 - DNA, 31 bp, Artificial Sequence
  Description of Artificial Sequence:  Enzymatic Nucleic Acid
ggcgccgaggctagctacaacgacggcggct

SEQ ID NO: 18930 - DNA, 31 bp, Artificial Sequence
  Description of Artificial Sequence:  Enzymatic Nucleic Acid
cccgggcgggctagctacaacgacgaccggc

SEQ ID NO: 18931 - DNA, 31 bp, Artificial Sequence
  Description of Artificial Sequence:  Enzymatic Nucleic Acid
agcccgggggctagctacaacgagccgaccg

SEQ ID NO: 18932 - DNA, 31 bp, Artificial Sequence
  Description of Artificial Sequence:  Enzymatic Nucleic Acid
ctagggagggctagctacaacgaccgggcgc

SEQ ID NO: 18933 - DNA, 31 bp, Artificial Sequence
  Description of Artificial Sequence:  Enzymatic Nucleic Acid
gcacagggggctagctacaacgatagggagc

SEQ ID NO: 18934 - DNA, 31 bp, Artificial Sequence
  Description of Artificial Sequence:  Enzymatic Nucleic Acid
tgagcgcaggctagctacaacgaagggctag

SEQ ID NO: 18935 - DNA, 31 bp, Artificial Sequence
  Description of Artificial Sequence:  Enzymatic Nucleic Acid
gttgagcgggctagctacaacgaacagggct

SEQ ID NO: 18936 - DNA, 31 bp, Artificial Sequence
  Description of Artificial Sequence:  Enzymatic Nucleic Acid
cagttgagggctagctacaacgagcacaggg

SEQ ID NO: 18937 - DNA, 31 bp, Artificial Sequence
  Description of Artificial Sequence:  Enzymatic Nucleic Acid
caggacagggctagctacaacgatgagcgca

SEQ ID NO: 18938 - DNA, 31 bp, Artificial Sequence
  Description of Artificial Sequence:  Enzymatic Nucleic Acid
gcgcaggaggctagctacaacgaagttgagc

SEQ ID NO: 18939 - DNA, 31 bp, Artificial Sequence
  Description of Artificial Sequence:  Enzymatic Nucleic Acid
ccgcagcgggctagctacaacgaaggacagt

SEQ ID NO: 18940 - DNA, 31 bp, Artificial Sequence
  Description of Artificial Sequence:  Enzymatic Nucleic Acid
ccccgcagggctagctacaacgagcaggaca

SEQ ID NO: 18941 - DNA, 31 bp, Artificial Sequence
  Description of Artificial Sequence:  Enzymatic Nucleic Acid
gcaccccgggctagctacaacgaagcgcagg

SEQ ID NO: 18942 - DNA, 31 bp, Artificial Sequence
  Description of Artificial Sequence:  Enzymatic Nucleic Acid
tcgcggcaggctagctacaacgacccgcagc

SEQ ID NO: 18943 - DNA, 31 bp, Artificial Sequence
  Description of Artificial Sequence:  Enzymatic Nucleic Acid
actcgcggggctagctacaacgaaccccgca

SEQ ID NO: 18944 - DNA, 31 bp, Artificial Sequence
  Description of Artificial Sequence:  Enzymatic Nucleic Acid
ggaactcgggctagctacaacgaggcacccc

SEQ ID NO: 18945 - DNA, 31 bp, Artificial Sequence
  Description of Artificial Sequence:  Enzymatic Nucleic Acid
aggtggaaggctagctacaacgatcgcggca

SEQ ID NO: 18946 - DNA, 31 bp, Artificial Sequence
  Description of Artificial Sequence:  Enzymatic Nucleic Acid
cgcggaggggctagctacaacgaggaactcg

SEQ ID NO: 18947 - DNA, 31 bp, Artificial Sequence
  Description of Artificial Sequence:  Enzymatic Nucleic Acid
aggaggcgggctagctacaacgaggaggtgg

SEQ ID NO: 18948 - DNA, 31 bp, Artificial Sequence
  Description of Artificial Sequence:  Enzymatic Nucleic Acid
gaaggaggggctagctacaacgagcggaggt

SEQ ID NO: 18949 - DNA, 31 bp, Artificial Sequence
  Description of Artificial Sequence:  Enzymatic Nucleic Acid
agcgcctgggctagctacaacgactagagaa

SEQ ID NO: 18950 - DNA, 31 bp, Artificial Sequence
  Description of Artificial Sequence:  Enzymatic Nucleic Acid
tcccagcgggctagctacaacgactgtctag

SEQ ID NO: 18951 - DNA, 31 bp, Artificial Sequence
  Description of Artificial Sequence:  Enzymatic Nucleic Acid
tctcccagggctagctacaacgagcctgtct

SEQ ID NO: 18952 - DNA, 31 bp, Artificial Sequence
  Description of Artificial Sequence:  Enzymatic Nucleic Acid
ggagccggggctagctacaacgatctttctc

SEQ ID NO: 18953 - DNA, 31 bp, Artificial Sequence
  Description of Artificial Sequence:  Enzymatic Nucleic Acid
ctcgggagggctagctacaacgacggttctt

SEQ ID NO: 18954 - DNA, 31 bp, Artificial Sequence
  Description of Artificial Sequence:  Enzymatic Nucleic Acid
gcccagaaggctagctacaacgatcgggagc

SEQ ID NO: 18955 - DNA, 31 bp, Artificial Sequence
  Description of Artificial Sequence:  Enzymatic Nucleic Acid
gcgaaatgggctagctacaacgaccagaact

SEQ ID NO: 18956 - DNA, 31 bp, Artificial Sequence
  Description of Artificial Sequence:  Enzymatic Nucleic Acid
gggcgaaaggctagctacaacgagcccagaa

SEQ ID NO: 18957 - DNA, 31 bp, Artificial Sequence
  Description of Artificial Sequence:  Enzymatic Nucleic Acid
gagccgggggctagctacaacgagaaatgcc

SEQ ID NO: 18958 - DNA, 31 bp, Artificial Sequence
  Description of Artificial Sequence:  Enzymatic Nucleic Acid
acctcgagggctagctacaacgacgggcgaa

SEQ ID NO: 18959 - DNA, 31 bp, Artificial Sequence
  Description of Artificial Sequence:  Enzymatic Nucleic Acid
atcctgcaggctagctacaacgactcgagcc

SEQ ID NO: 18960 - DNA, 31 bp, Artificial Sequence
  Description of Artificial Sequence:  Enzymatic Nucleic Acid
gcatcctgggctagctacaacgaacctcgag

SEQ ID NO: 18961 - DNA, 31 bp, Artificial Sequence
  Description of Artificial Sequence:  Enzymatic Nucleic Acid
gctctgcaggctagctacaacgacctgcacc

SEQ ID NO: 18962 - DNA, 31 bp, Artificial Sequence
  Description of Artificial Sequence:  Enzymatic Nucleic Acid
ttgctctgggctagctacaacgaatcctgca

SEQ ID NO: 18963 - DNA, 31 bp, Artificial Sequence
  Description of Artificial Sequence:  Enzymatic Nucleic Acid
gcaccttgggctagctacaacgatctgcatc

SEQ ID NO: 18964 - DNA, 31 bp, Artificial Sequence
  Description of Artificial Sequence:  Enzymatic Nucleic Acid
cagcagcaggctagctacaacgacttgctct

SEQ ID NO: 18965 - DNA, 31 bp, Artificial Sequence
  Description of Artificial Sequence:  Enzymatic Nucleic Acid
gccagcagggctagctacaacgaaccttgct

SEQ ID NO: 18966 - DNA, 31 bp, Artificial Sequence
  Description of Artificial Sequence:  Enzymatic Nucleic Acid
acggccagggctagctacaacgaagcacctt

SEQ ID NO: 18967 - DNA, 31 bp, Artificial Sequence
  Description of Artificial Sequence:  Enzymatic Nucleic Acid
ggcgacggggctagctacaacgacagcagca

SEQ ID NO: 18968 - DNA, 31 bp, Artificial Sequence
  Description of Artificial Sequence:  Enzymatic Nucleic Acid
cagggcgaggctagctacaacgaggccagca

SEQ ID NO: 18969 - DNA, 31 bp, Artificial Sequence
  Description of Artificial Sequence:  Enzymatic Nucleic Acid
ccacagggggctagctacaacgagacggcca

SEQ ID NO: 18970 - DNA, 31 bp, Artificial Sequence
  Description of Artificial Sequence:  Enzymatic Nucleic Acid
cagagccaggctagctacaacgaagggcgac

SEQ ID NO: 18971 - DNA, 31 bp, Artificial Sequence
  Description of Artificial Sequence:  Enzymatic Nucleic Acid
acgcagagggctagctacaacgacacagggc

SEQ ID NO: 18972 - DNA, 31 bp, Artificial Sequence
  Description of Artificial Sequence:  Enzymatic Nucleic Acid
tctccacgggctagctacaacgaagagccac

SEQ ID NO: 18973 - DNA, 31 bp, Artificial Sequence
  Description of Artificial Sequence:  Enzymatic Nucleic Acid
ggtctccaggctagctacaacgagcagagcc

SEQ ID NO: 18974 - DNA, 31 bp, Artificial Sequence
  Description of Artificial Sequence:  Enzymatic Nucleic Acid
ggcccgggggctagctacaacgactccacgc

SEQ ID NO: 18975 - DNA, 31 bp, Artificial Sequence
  Description of Artificial Sequence:  Enzymatic Nucleic Acid
agaggcggggctagctacaacgaccgggtct

SEQ ID NO: 18976 - DNA, 31 bp, Artificial Sequence
  Description of Artificial Sequence:  Enzymatic Nucleic Acid
cacagaggggctagctacaacgaggcccggg

SEQ ID NO: 18977 - DNA, 31 bp, Artificial Sequence
  Description of Artificial Sequence:  Enzymatic Nucleic Acid
caaacccaggctagctacaacgaagaggcgg

SEQ ID NO: 18978 - DNA, 31 bp, Artificial Sequence
  Description of Artificial Sequence:  Enzymatic Nucleic Acid
taggcaaaggctagctacaacgaccacagag

SEQ ID NO: 18979 - DNA, 31 bp, Artificial Sequence
  Description of Artificial Sequence:  Enzymatic Nucleic Acid
acactaggggctagctacaacgaaaacccac

SEQ ID NO: 18980 - DNA, 31 bp, Artificial Sequence
  Description of Artificial Sequence:  Enzymatic Nucleic Acid
gagaaacaggctagctacaacgataggcaaa

SEQ ID NO: 18981 - DNA, 31 bp, Artificial Sequence
  Description of Artificial Sequence:  Enzymatic Nucleic Acid
aagagaaaggctagctacaacgaactaggca

SEQ ID NO: 18982 - DNA, 31 bp, Artificial Sequence
  Description of Artificial Sequence:  Enzymatic Nucleic Acid
tgggcagaggctagctacaacgacaagagaa

SEQ ID NO: 18983 - DNA, 31 bp, Artificial Sequence
  Description of Artificial Sequence:  Enzymatic Nucleic Acid
agcctgggggctagctacaacgaagatcaag

SEQ ID NO: 18984 - DNA, 31 bp, Artificial Sequence
  Description of Artificial Sequence:  Enzymatic Nucleic Acid
atgctgagggctagctacaacgactgggcag

SEQ ID NO: 18985 - DNA, 31 bp, Artificial Sequence
  Description of Artificial Sequence:  Enzymatic Nucleic Acid
tttgtatgggctagctacaacgatgagcctg

SEQ ID NO: 18986 - DNA, 31 bp, Artificial Sequence
  Description of Artificial Sequence:  Enzymatic Nucleic Acid
tttttgtaggctagctacaacgagctgagcc

SEQ ID NO: 18987 - DNA, 31 bp, Artificial Sequence
  Description of Artificial Sequence:  Enzymatic Nucleic Acid
tctttttgggctagctacaacgaatgctgag

SEQ ID NO: 18988 - DNA, 31 bp, Artificial Sequence
  Description of Artificial Sequence:  Enzymatic Nucleic Acid
taagtatgggctagctacaacgactttttgt

SEQ ID NO: 18989 - DNA, 31 bp, Artificial Sequence
  Description of Artificial Sequence:  Enzymatic Nucleic Acid
tgtaagtaggctagctacaacgagtcttttt

SEQ ID NO: 18990 - DNA, 31 bp, Artificial Sequence
  Description of Artificial Sequence:  Enzymatic Nucleic Acid
attgtaagggctagctacaacgaatgtcttt

SEQ ID NO: 18991 - DNA, 31 bp, Artificial Sequence
  Description of Artificial Sequence:  Enzymatic Nucleic Acid
cttaattgggctagctacaacgaaagtatgt

SEQ ID NO: 18992 - DNA, 31 bp, Artificial Sequence
  Description of Artificial Sequence:  Enzymatic Nucleic Acid
agccttaaggctagctacaacgatgtaagta

SEQ ID NO: 18993 - DNA, 31 bp, Artificial Sequence
  Description of Artificial Sequence:  Enzymatic Nucleic Acid
tgtattagggctagctacaacgacttaattg

SEQ ID NO: 18994 - DNA, 31 bp, Artificial Sequence
  Description of Artificial Sequence:  Enzymatic Nucleic Acid
gagttgtaggctagctacaacgatagcctta

SEQ ID NO: 18995 - DNA, 31 bp, Artificial Sequence
  Description of Artificial Sequence:  Enzymatic Nucleic Acid
aagagttgggctagctacaacgaattagcct

SEQ ID NO: 18996 - DNA, 31 bp, Artificial Sequence
  Description of Artificial Sequence:  Enzymatic Nucleic Acid
ttgaagagggctagctacaacgatgtattag

SEQ ID NO: 18997 - DNA, 31 bp, Artificial Sequence
  Description of Artificial Sequence:  Enzymatic Nucleic Acid
gcaagtaaggctagctacaacgattgaagag

SEQ ID NO: 18998 - DNA, 31 bp, Artificial Sequence
  Description of Artificial Sequence:  Enzymatic Nucleic Acid
cctgcaagggctagctacaacgaaatttgaa

SEQ ID NO: 18999 - DNA, 31 bp, Artificial Sequence
  Description of Artificial Sequence:  Enzymatic Nucleic Acid
gtcccctgggctagctacaacgaaagtaatt

SEQ ID NO: 19000 - DNA, 31 bp, Artificial Sequence
  Description of Artificial Sequence:  Enzymatic Nucleic Acid
tccctctgggctagctacaacgacccctgca

SEQ ID NO: 19001 - DNA, 31 bp, Artificial Sequence
  Description of Artificial Sequence:  Enzymatic Nucleic Acid
agtccaagggctagctacaacgaccctctgt

SEQ ID NO: 19002 - DNA, 31 bp, Artificial Sequence
  Description of Artificial Sequence:  Enzymatic Nucleic Acid
aaagccagggctagctacaacgaccaagtcc

SEQ ID NO: 19003 - DNA, 31 bp, Artificial Sequence
  Description of Artificial Sequence:  Enzymatic Nucleic Acid
ggccaaagggctagctacaacgacagtccaa

SEQ ID NO: 19004 - DNA, 31 bp, Artificial Sequence
  Description of Artificial Sequence:  Enzymatic Nucleic Acid
ttattgggggctagctacaacgacaaagcca

SEQ ID NO: 19005 - DNA, 31 bp, Artificial Sequence
  Description of Artificial Sequence:  Enzymatic Nucleic Acid
tctgattaggctagctacaacgatgggccaa

SEQ ID NO: 19006 - DNA, 31 bp, Artificial Sequence
  Description of Artificial Sequence:  Enzymatic Nucleic Acid
cactctgaggctagctacaacgatattgggc

SEQ ID NO: 19007 - DNA, 31 bp, Artificial Sequence
  Description of Artificial Sequence:  Enzymatic Nucleic Acid
cactgccaggctagctacaacgatctgatta

SEQ ID NO: 19008 - DNA, 31 bp, Artificial Sequence
  Description of Artificial Sequence:  Enzymatic Nucleic Acid
gctcactgggctagctacaacgacactctga

SEQ ID NO: 19009 - DNA, 31 bp, Artificial Sequence
  Description of Artificial Sequence:  Enzymatic Nucleic Acid
tttgctcaggctagctacaacgatgccactc

SEQ ID NO: 19010 - DNA, 31 bp, Artificial Sequence
  Description of Artificial Sequence:  Enzymatic Nucleic Acid
accctttgggctagctacaacgatcactgcc

SEQ ID NO: 19011 - DNA, 31 bp, Artificial Sequence
  Description of Artificial Sequence:  Enzymatic Nucleic Acid
cacctccaggctagctacaacgacctttgct

SEQ ID NO: 19012 - DNA, 31 bp, Artificial Sequence
  Description of Artificial Sequence:  Enzymatic Nucleic Acid
ctcagtcaggctagctacaacgactccaccc

SEQ ID NO: 19013 - DNA, 31 bp, Artificial Sequence
  Description of Artificial Sequence:  Enzymatic Nucleic Acid
gcactcagggctagctacaacgacacctcca

SEQ ID NO: 19014 - DNA, 31 bp, Artificial Sequence
  Description of Artificial Sequence:  Enzymatic Nucleic Acid
tcgctgcaggctagctacaacgatcagtcac

SEQ ID NO: 19015 - DNA, 31 bp, Artificial Sequence
  Description of Artificial Sequence:  Enzymatic Nucleic Acid
catcgctgggctagctacaacgaactcagtc

SEQ ID NO: 19016 - DNA, 31 bp, Artificial Sequence
  Description of Artificial Sequence:  Enzymatic Nucleic Acid
ggccatcgggctagctacaacgatgcactca

SEQ ID NO: 19017 - DNA, 31 bp, Artificial Sequence
  Description of Artificial Sequence:  Enzymatic Nucleic Acid
agaggccaggctagctacaacgacgctgcac

SEQ ID NO: 19018 - DNA, 31 bp, Artificial Sequence
  Description of Artificial Sequence:  Enzymatic Nucleic Acid
agaagaggggctagctacaacgacatcgctg

SEQ ID NO: 19019 - DNA, 31 bp, Artificial Sequence
  Description of Artificial Sequence:  Enzymatic Nucleic Acid
gtgtcttaggctagctacaacgaagaagagg

SEQ ID NO: 19020 - DNA, 31 bp, Artificial Sequence
  Description of Artificial Sequence:  Enzymatic Nucleic Acid
tgtgagtgggctagctacaacgacttacaga

SEQ ID NO: 19021 - DNA, 31 bp, Artificial Sequence
  Description of Artificial Sequence:  Enzymatic Nucleic Acid
attgtgagggctagctacaacgagtcttaca

SEQ ID NO: 19022 - DNA, 31 bp, Artificial Sequence
  Description of Artificial Sequence:  Enzymatic Nucleic Acid
tggaattgggctagctacaacgagagtgtct

SEQ ID NO: 19023 - DNA, 31 bp, Artificial Sequence
  Description of Artificial Sequence:  Enzymatic Nucleic Acid
ttttggaaggctagctacaacgatgtgagtg

SEQ ID NO: 19024 - DNA, 31 bp, Artificial Sequence
  Description of Artificial Sequence:  Enzymatic Nucleic Acid
tccgatcaggctagctacaacgattttggaa

SEQ ID NO: 19025 - DNA, 31 bp, Artificial Sequence
  Description of Artificial Sequence:  Enzymatic Nucleic Acid
atttccgaggctagctacaacgacacttttg

SEQ ID NO: 19026 - DNA, 31 bp, Artificial Sequence
  Description of Artificial Sequence:  Enzymatic Nucleic Acid
cagtgtcaggctagctacaacgattccgatc

SEQ ID NO: 19027 - DNA, 31 bp, Artificial Sequence
  Description of Artificial Sequence:  Enzymatic Nucleic Acid
ctccagtgggctagctacaacgacatttccg

SEQ ID NO: 19028 - DNA, 31 bp, Artificial Sequence
  Description of Artificial Sequence:  Enzymatic Nucleic Acid
ggctccagggctagctacaacgagtcatttc

SEQ ID NO: 19029 - DNA, 31 bp, Artificial Sequence
  Description of Artificial Sequence:  Enzymatic Nucleic Acid
cttgtaggggctagctacaacgatccagtgt

SEQ ID NO: 19030 - DNA, 31 bp, Artificial Sequence
  Description of Artificial Sequence:  Enzymatic Nucleic Acid
agcacttgggctagctacaacgaaggctcca

SEQ ID NO: 19031 - DNA, 31 bp, Artificial Sequence
  Description of Artificial Sequence:  Enzymatic Nucleic Acid
tagaagcaggctagctacaacgattgtaggc

SEQ ID NO: 19032 - DNA, 31 bp, Artificial Sequence
  Description of Artificial Sequence:  Enzymatic Nucleic Acid
ggtagaagggctagctacaacgaacttgtag

SEQ ID NO: 19033 - DNA, 31 bp, Artificial Sequence
  Description of Artificial Sequence:  Enzymatic Nucleic Acid
tttcccggggctagctacaacgaagaagcac

SEQ ID NO: 19034 - DNA, 31 bp, Artificial Sequence
  Description of Artificial Sequence:  Enzymatic Nucleic Acid
caagtcagggctagctacaacgattcccggt

SEQ ID NO: 19035 - DNA, 31 bp, Artificial Sequence
  Description of Artificial Sequence:  Enzymatic Nucleic Acid
aggccaagggctagctacaacgacagtttcc

SEQ ID NO: 19036 - DNA, 31 bp, Artificial Sequence
  Description of Artificial Sequence:  Enzymatic Nucleic Acid
gaccgaggggctagctacaacgacaagtcag

SEQ ID NO: 19037 - DNA, 31 bp, Artificial Sequence
  Description of Artificial Sequence:  Enzymatic Nucleic Acid
ataaatgaggctagctacaacgacgaggcca

SEQ ID NO: 19038 - DNA, 31 bp, Artificial Sequence
  Description of Artificial Sequence:  Enzymatic Nucleic Acid
gacataaaggctagctacaacgagaccgagg

SEQ ID NO: 19039 - DNA, 31 bp, Artificial Sequence
  Description of Artificial Sequence:  Enzymatic Nucleic Acid
catagacaggctagctacaacgaaaatgacc

SEQ ID NO: 19040 - DNA, 31 bp, Artificial Sequence
  Description of Artificial Sequence:  Enzymatic Nucleic Acid
aacatagaggctagctacaacgaataaatga

SEQ ID NO: 19041 - DNA, 31 bp, Artificial Sequence
  Description of Artificial Sequence:  Enzymatic Nucleic Acid
cttgaacaggctagctacaacgaagacataa

SEQ ID NO: 19042 - DNA, 31 bp, Artificial Sequence
  Description of Artificial Sequence:  Enzymatic Nucleic Acid
atcttgaaggctagctacaacgaatagacat

SEQ ID NO: 19043 - DNA, 31 bp, Artificial Sequence
  Description of Artificial Sequence:  Enzymatic Nucleic Acid
atctgtaaggctagctacaacgacttgaaca

SEQ ID NO: 19044 - DNA, 31 bp, Artificial Sequence
  Description of Artificial Sequence:  Enzymatic Nucleic Acid
gagatctgggctagctacaacgaaatcttga

SEQ ID NO: 19045 - DNA, 31 bp, Artificial Sequence
  Description of Artificial Sequence:  Enzymatic Nucleic Acid
aatggagaggctagctacaacgactgtaatc

SEQ ID NO: 19046 - DNA, 31 bp, Artificial Sequence
  Description of Artificial Sequence:  Enzymatic Nucleic Acid
gcaataaaggctagctacaacgaggagatct

SEQ ID NO: 19047 - DNA, 31 bp, Artificial Sequence
  Description of Artificial Sequence:  Enzymatic Nucleic Acid
agaagcaaggctagctacaacgaaaatggag

SEQ ID NO: 19048 - DNA, 31 bp, Artificial Sequence
  Description of Artificial Sequence:  Enzymatic Nucleic Acid
aacagaagggctagctacaacgaaataaatg

SEQ ID NO: 19049 - DNA, 31 bp, Artificial Sequence
  Description of Artificial Sequence:  Enzymatic Nucleic Acid
gtcactaaggctagctacaacgaagaagcaa

SEQ ID NO: 19050 - DNA, 31 bp, Artificial Sequence
  Description of Artificial Sequence:  Enzymatic Nucleic Acid
gttggtcaggctagctacaacgataacagaa

SEQ ID NO: 19051 - DNA, 31 bp, Artificial Sequence
  Description of Artificial Sequence:  Enzymatic Nucleic Acid
catgttggggctagctacaacgacactaaca

SEQ ID NO: 19052 - DNA, 31 bp, Artificial Sequence
  Description of Artificial Sequence:  Enzymatic Nucleic Acid
actccatgggctagctacaacgatggtcact

SEQ ID NO: 19053 - DNA, 31 bp, Artificial Sequence
  Description of Artificial Sequence:  Enzymatic Nucleic Acid
cgactccaggctagctacaacgagttggtca

SEQ ID NO: 19054 - DNA, 31 bp, Artificial Sequence
  Description of Artificial Sequence:  Enzymatic Nucleic Acid
gtacacgaggctagctacaacgatccatgtt

SEQ ID NO: 19055 - DNA, 31 bp, Artificial Sequence
  Description of Artificial Sequence:  Enzymatic Nucleic Acid
aatgtacaggctagctacaacgagactccat

SEQ ID NO: 19056 - DNA, 31 bp, Artificial Sequence
  Description of Artificial Sequence:  Enzymatic Nucleic Acid
gtaatgtaggctagctacaacgaacgactcc

SEQ ID NO: 19057 - DNA, 31 bp, Artificial Sequence
  Description of Artificial Sequence:  Enzymatic Nucleic Acid
cagtaatgggctagctacaacgaacacgact

SEQ ID NO: 19058 - DNA, 31 bp, Artificial Sequence
  Description of Artificial Sequence:  Enzymatic Nucleic Acid
ctcagtaaggctagctacaacgagtacacga

SEQ ID NO: 19059 - DNA, 31 bp, Artificial Sequence
  Description of Artificial Sequence:  Enzymatic Nucleic Acid
gttctcagggctagctacaacgaaatgtaca

SEQ ID NO: 19060 - DNA, 31 bp, Artificial Sequence
  Description of Artificial Sequence:  Enzymatic Nucleic Acid
tgtttttgggctagctacaacgatctcagta

SEQ ID NO: 19061 - DNA, 31 bp, Artificial Sequence
  Description of Artificial Sequence:  Enzymatic Nucleic Acid
cagttttgggctagctacaacgattttgttc

SEQ ID NO: 19062 - DNA, 31 bp, Artificial Sequence
  Description of Artificial Sequence:  Enzymatic Nucleic Acid
caccacagggctagctacaacgatttgtttt

SEQ ID NO: 19063 - DNA, 31 bp, Artificial Sequence
  Description of Artificial Sequence:  Enzymatic Nucleic Acid
aatcaccaggctagctacaacgaagttttgt

SEQ ID NO: 19064 - DNA, 31 bp, Artificial Sequence
  Description of Artificial Sequence:  Enzymatic Nucleic Acid
tggaatcaggctagctacaacgacacagttt

SEQ ID NO: 19065 - DNA, 31 bp, Artificial Sequence
  Description of Artificial Sequence:  Enzymatic Nucleic Acid
acatggaaggctagctacaacgacaccacag

SEQ ID NO: 19066 - DNA, 31 bp, Artificial Sequence
  Description of Artificial Sequence:  Enzymatic Nucleic Acid
ccgagacaggctagctacaacgaggaatcac

SEQ ID NO: 19067 - DNA, 31 bp, Artificial Sequence
  Description of Artificial Sequence:  Enzymatic Nucleic Acid
acccgagaggctagctacaacgaatggaatc

SEQ ID NO: 19068 - DNA, 31 bp, Artificial Sequence
  Description of Artificial Sequence:  Enzymatic Nucleic Acid
gaaatggaggctagctacaacgaccgagaca

SEQ ID NO: 19069 - DNA, 31 bp, Artificial Sequence
  Description of Artificial Sequence:  Enzymatic Nucleic Acid
atttgaaaggctagctacaacgaggacccga

SEQ ID NO: 19070 - DNA, 31 bp, Artificial Sequence
  Description of Artificial Sequence:  Enzymatic Nucleic Acid
cgttgagaggctagctacaacgattgaaatg

SEQ ID NO: 19071 - DNA, 31 bp, Artificial Sequence
  Description of Artificial Sequence:  Enzymatic Nucleic Acid
gtgacacgggctagctacaacgatgagattt

SEQ ID NO: 19072 - DNA, 31 bp, Artificial Sequence
  Description of Artificial Sequence:  Enzymatic Nucleic Acid
aagtgacaggctagctacaacgagttgagat

SEQ ID NO: 19073 - DNA, 31 bp, Artificial Sequence
  Description of Artificial Sequence:  Enzymatic Nucleic Acid
caaagtgaggctagctacaacgaacgttgag

SEQ ID NO: 19074 - DNA, 31 bp, Artificial Sequence
  Description of Artificial Sequence:  Enzymatic Nucleic Acid
gcacaaagggctagctacaacgagacacgtt

SEQ ID NO: 19075 - DNA, 31 bp, Artificial Sequence
  Description of Artificial Sequence:  Enzymatic Nucleic Acid
atcttgcaggctagctacaacgaaaagtgac

SEQ ID NO: 19076 - DNA, 31 bp, Artificial Sequence
  Description of Artificial Sequence:  Enzymatic Nucleic Acid
gtatcttgggctagctacaacgaacaaagtg

SEQ ID NO: 19077 - DNA, 31 bp, Artificial Sequence
  Description of Artificial Sequence:  Enzymatic Nucleic Acid
tctgggtaggctagctacaacgacttgcaca

SEQ ID NO: 19078 - DNA, 31 bp, Artificial Sequence
  Description of Artificial Sequence:  Enzymatic Nucleic Acid
tttctgggggctagctacaacgaatcttgca

SEQ ID NO: 19079 - DNA, 31 bp, Artificial Sequence
  Description of Artificial Sequence:  Enzymatic Nucleic Acid
ggaacaaaggctagctacaacgactcttttc

SEQ ID NO: 19080 - DNA, 31 bp, Artificial Sequence
  Description of Artificial Sequence:  Enzymatic Nucleic Acid
atcaggaaggctagctacaacgaaaatctct

SEQ ID NO: 19081 - DNA, 31 bp, Artificial Sequence
  Description of Artificial Sequence:  Enzymatic Nucleic Acid
tgttaccaggctagctacaacgacaggaaca

SEQ ID NO: 19082 - DNA, 31 bp, Artificial Sequence
  Description of Artificial Sequence:  Enzymatic Nucleic Acid
ttctgttaggctagctacaacgacatcagga

SEQ ID NO: 19083 - DNA, 31 bp, Artificial Sequence
  Description of Artificial Sequence:  Enzymatic Nucleic Acid
aaattctgggctagctacaacgataccatca

SEQ ID NO: 19084 - DNA, 31 bp, Artificial Sequence
  Description of Artificial Sequence:  Enzymatic Nucleic Acid
ccaggaaaggctagctacaacgatctgttac

SEQ ID NO: 19085 - DNA, 31 bp, Artificial Sequence
  Description of Artificial Sequence:  Enzymatic Nucleic Acid
tcttgctgggctagctacaacgacccaggaa

SEQ ID NO: 19086 - DNA, 31 bp, Artificial Sequence
  Description of Artificial Sequence:  Enzymatic Nucleic Acid
ccttcttgggctagctacaacgatgtcccag

SEQ ID NO: 19087 - DNA, 31 bp, Artificial Sequence
  Description of Artificial Sequence:  Enzymatic Nucleic Acid
tagtaaagggctagctacaacgaccttcttg

SEQ ID NO: 19088 - DNA, 31 bp, Artificial Sequence
  Description of Artificial Sequence:  Enzymatic Nucleic Acid
gggaatagggctagctacaacgaaaagccct

SEQ ID NO: 19089 - DNA, 31 bp, Artificial Sequence
  Description of Artificial Sequence:  Enzymatic Nucleic Acid
gctgggaaggctagctacaacgaagtaaagc

SEQ ID NO: 19090 - DNA, 31 bp, Artificial Sequence
  Description of Artificial Sequence:  Enzymatic Nucleic Acid
tcatgtagggctagctacaacgatgggaata

SEQ ID NO: 19091 - DNA, 31 bp, Artificial Sequence
  Description of Artificial Sequence:  Enzymatic Nucleic Acid
tgatcatgggctagctacaacgaagctggga

SEQ ID NO: 19092 - DNA, 31 bp, Artificial Sequence
  Description of Artificial Sequence:  Enzymatic Nucleic Acid
gctgatcaggctagctacaacgagtagctgg

SEQ ID NO: 19093 - DNA, 31 bp, Artificial Sequence
  Description of Artificial Sequence:  Enzymatic Nucleic Acid
atagctgaggctagctacaacgacatgtagc

SEQ ID NO: 19094 - DNA, 31 bp, Artificial Sequence
  Description of Artificial Sequence:  Enzymatic Nucleic Acid
cagcatagggctagctacaacgatgatcatg

SEQ ID NO: 19095 - DNA, 31 bp, Artificial Sequence
  Description of Artificial Sequence:  Enzymatic Nucleic Acid
tgccagcaggctagctacaacgaagctgatc

SEQ ID NO: 19096 - DNA, 31 bp, Artificial Sequence
  Description of Artificial Sequence:  Enzymatic Nucleic Acid
catgccagggctagctacaacgaatagctga

SEQ ID NO: 19097 - DNA, 31 bp, Artificial Sequence
  Description of Artificial Sequence:  Enzymatic Nucleic Acid
agaccatgggctagctacaacgacagcatag

SEQ ID NO: 19098 - DNA, 31 bp, Artificial Sequence
  Description of Artificial Sequence:  Enzymatic Nucleic Acid
gaagaccaggctagctacaacgagccagcat

SEQ ID NO: 19099 - DNA, 31 bp, Artificial Sequence
  Description of Artificial Sequence:  Enzymatic Nucleic Acid
acagaagaggctagctacaacgacatgccag

SEQ ID NO: 19100 - DNA, 31 bp, Artificial Sequence
  Description of Artificial Sequence:  Enzymatic Nucleic Acid
ttgcttcaggctagctacaacgaagaagacc

SEQ ID NO: 19101 - DNA, 31 bp, Artificial Sequence
  Description of Artificial Sequence:  Enzymatic Nucleic Acid
aatttttgggctagctacaacgattcacaga

SEQ ID NO: 19102 - DNA, 31 bp, Artificial Sequence
  Description of Artificial Sequence:  Enzymatic Nucleic Acid
atcattaaggctagctacaacgattttgctt

SEQ ID NO: 19103 - DNA, 31 bp, Artificial Sequence
  Description of Artificial Sequence:  Enzymatic Nucleic Acid
tttcatcaggctagctacaacgataattttt

SEQ ID NO: 19104 - DNA, 31 bp, Artificial Sequence
  Description of Artificial Sequence:  Enzymatic Nucleic Acid
aactttcaggctagctacaacgacattaatt

SEQ ID NO: 19105 - DNA, 31 bp, Artificial Sequence
  Description of Artificial Sequence:  Enzymatic Nucleic Acid
actggtaaggctagctacaacgatttcatca

SEQ ID NO: 19106 - DNA, 31 bp, Artificial Sequence
  Description of Artificial Sequence:  Enzymatic Nucleic Acid
tagactggggctagctacaacgaaactttca

SEQ ID NO: 19107 - DNA, 31 bp, Artificial Sequence
  Description of Artificial Sequence:  Enzymatic Nucleic Acid
ataatagaggctagctacaacgatggtaact

SEQ ID NO: 19108 - DNA, 31 bp, Artificial Sequence
  Description of Artificial Sequence:  Enzymatic Nucleic Acid
gtacataaggctagctacaacgaagactggt

SEQ ID NO: 19109 - DNA, 31 bp, Artificial Sequence
  Description of Artificial Sequence:  Enzymatic Nucleic Acid
tatgtacaggctagctacaacgaaatagact

SEQ ID NO: 19110 - DNA, 31 bp, Artificial Sequence
  Description of Artificial Sequence:  Enzymatic Nucleic Acid
actatgtaggctagctacaacgaataataga

SEQ ID NO: 19111 - DNA, 31 bp, Artificial Sequence
  Description of Artificial Sequence:  Enzymatic Nucleic Acid
caactatgggctagctacaacgaacataata

SEQ ID NO: 19112 - DNA, 31 bp, Artificial Sequence
  Description of Artificial Sequence:  Enzymatic Nucleic Acid
gacaactaggctagctacaacgagtacataa

SEQ ID NO: 19113 - DNA, 31 bp, Artificial Sequence
  Description of Artificial Sequence:  Enzymatic Nucleic Acid
aacgacaaggctagctacaacgatatgtaca

SEQ ID NO: 19114 - DNA, 31 bp, Artificial Sequence
  Description of Artificial Sequence:  Enzymatic Nucleic Acid
tacaacgaggctagctacaacgaaactatgt

SEQ ID NO: 19115 - DNA, 31 bp, Artificial Sequence
  Description of Artificial Sequence:  Enzymatic Nucleic Acid
ccctacaaggctagctacaacgagacaacta

SEQ ID NO: 19116 - DNA, 31 bp, Artificial Sequence
  Description of Artificial Sequence:  Enzymatic Nucleic Acid
ataccctaggctagctacaacgaaacgacaa

SEQ ID NO: 19117 - DNA, 31 bp, Artificial Sequence
  Description of Artificial Sequence:  Enzymatic Nucleic Acid
atcctataggctagctacaacgacctacaac

SEQ ID NO: 19118 - DNA, 31 bp, Artificial Sequence
  Description of Artificial Sequence:  Enzymatic Nucleic Acid
aaatcctaggctagctacaacgaaccctaca

SEQ ID NO: 19119 - DNA, 31 bp, Artificial Sequence
  Description of Artificial Sequence:  Enzymatic Nucleic Acid
atcataaaggctagctacaacgacctatacc

SEQ ID NO: 19120 - DNA, 31 bp, Artificial Sequence
  Description of Artificial Sequence:  Enzymatic Nucleic Acid
ccacatcaggctagctacaacgaaaatccta

SEQ ID NO: 19121 - DNA, 31 bp, Artificial Sequence
  Description of Artificial Sequence:  Enzymatic Nucleic Acid
gaaccacaggctagctacaacgacataaatc

SEQ ID NO: 19122 - DNA, 31 bp, Artificial Sequence
  Description of Artificial Sequence:  Enzymatic Nucleic Acid
cagaaccaggctagctacaacgaatcataaa

SEQ ID NO: 19123 - DNA, 31 bp, Artificial Sequence
  Description of Artificial Sequence:  Enzymatic Nucleic Acid
actcagaaggctagctacaacgacacatcat

SEQ ID NO: 19124 - DNA, 31 bp, Artificial Sequence
  Description of Artificial Sequence:  Enzymatic Nucleic Acid
gagacggaggctagctacaacgatcagaacc

SEQ ID NO: 19125 - DNA, 31 bp, Artificial Sequence
  Description of Artificial Sequence:  Enzymatic Nucleic Acid
ccatgagaggctagctacaacgaggactcag

SEQ ID NO: 19126 - DNA, 31 bp, Artificial Sequence
  Description of Artificial Sequence:  Enzymatic Nucleic Acid
caattccaggctagctacaacgagagacgga

SEQ ID NO: 19127 - DNA, 31 bp, Artificial Sequence
  Description of Artificial Sequence:  Enzymatic Nucleic Acid
tagttcaaggctagctacaacgatccatgag

SEQ ID NO: 19128 - DNA, 31 bp, Artificial Sequence
  Description of Artificial Sequence:  Enzymatic Nucleic Acid
acagatagggctagctacaacgatcaattcc

SEQ ID NO: 19129 - DNA, 31 bp, Artificial Sequence
  Description of Artificial Sequence:  Enzymatic Nucleic Acid
ccaacagaggctagctacaacgaagttcaat

SEQ ID NO: 19130 - DNA, 31 bp, Artificial Sequence
  Description of Artificial Sequence:  Enzymatic Nucleic Acid
ttctccaaggctagctacaacgaagatagtt

SEQ ID NO: 19131 - DNA, 31 bp, Artificial Sequence
  Description of Artificial Sequence:  Enzymatic Nucleic Acid
aagacaagggctagctacaacgattttctcc

SEQ ID NO: 19132 - DNA, 31 bp, Artificial Sequence
  Description of Artificial Sequence:  Enzymatic Nucleic Acid
atttaagaggctagctacaacgaaagctttt

SEQ ID NO: 19133 - DNA, 31 bp, Artificial Sequence
  Description of Artificial Sequence:  Enzymatic Nucleic Acid
ctgtacaaggctagctacaacgattaagaca

SEQ ID NO: 19134 - DNA, 31 bp, Artificial Sequence
  Description of Artificial Sequence:  Enzymatic Nucleic Acid
ttgctgtaggctagctacaacgaaatttaag

SEQ ID NO: 19135 - DNA, 31 bp, Artificial Sequence
  Description of Artificial Sequence:  Enzymatic Nucleic Acid
tcttgctgggctagctacaacgaacaattta

SEQ ID NO: 19136 - DNA, 31 bp, Artificial Sequence
  Description of Artificial Sequence:  Enzymatic Nucleic Acid
agttcttgggctagctacaacgatgtacaat

SEQ ID NO: 19137 - DNA, 31 bp, Artificial Sequence
  Description of Artificial Sequence:  Enzymatic Nucleic Acid
tagttcagggctagctacaacgatcttgctg

SEQ ID NO: 19138 - DNA, 31 bp, Artificial Sequence
  Description of Artificial Sequence:  Enzymatic Nucleic Acid
acatttagggctagctacaacgatcagttct

SEQ ID NO: 19139 - DNA, 31 bp, Artificial Sequence
  Description of Artificial Sequence:  Enzymatic Nucleic Acid
tccccacaggctagctacaacgattagttca

SEQ ID NO: 19140 - DNA, 31 bp, Artificial Sequence
  Description of Artificial Sequence:  Enzymatic Nucleic Acid
aatccccaggctagctacaacgaatttagtt

SEQ ID NO: 19141 - DNA, 31 bp, Artificial Sequence
  Description of Artificial Sequence:  Enzymatic Nucleic Acid
gaagtcaaggctagctacaacgaccccacat

SEQ ID NO: 19142 - DNA, 31 bp, Artificial Sequence
  Description of Artificial Sequence:  Enzymatic Nucleic Acid
agttgaagggctagctacaacgacaatcccc

SEQ ID NO: 19143 - DNA, 31 bp, Artificial Sequence
  Description of Artificial Sequence:  Enzymatic Nucleic Acid
attcccagggctagctacaacgatgaagtca

SEQ ID NO: 19144 - DNA, 31 bp, Artificial Sequence
  Description of Artificial Sequence:  Enzymatic Nucleic Acid
gaagggtaggctagctacaacgatcccagtt

SEQ ID NO: 19145 - DNA, 31 bp, Artificial Sequence
  Description of Artificial Sequence:  Enzymatic Nucleic Acid
aagaagggggctagctacaacgaattcccag

SEQ ID NO: 19146 - DNA, 31 bp, Artificial Sequence
  Description of Artificial Sequence:  Enzymatic Nucleic Acid
tgctgatgggctagctacaacgattcgaaga

SEQ ID NO: 19147 - DNA, 31 bp, Artificial Sequence
  Description of Artificial Sequence:  Enzymatic Nucleic Acid
tatgctgaggctagctacaacgagcttcgaa

SEQ ID NO: 19148 - DNA, 31 bp, Artificial Sequence
  Description of Artificial Sequence:  Enzymatic Nucleic Acid
ttcttatgggctagctacaacgatgatgctt

SEQ ID NO: 19149 - DNA, 31 bp, Artificial Sequence
  Description of Artificial Sequence:  Enzymatic Nucleic Acid
gtttcttaggctagctacaacgagctgatgc

SEQ ID NO: 19150 - DNA, 31 bp, Artificial Sequence
  Description of Artificial Sequence:  Enzymatic Nucleic Acid
tttacaagggctagctacaacgattcttatg

SEQ ID NO: 19151 - DNA, 31 bp, Artificial Sequence
  Description of Artificial Sequence:  Enzymatic Nucleic Acid
tcggtttaggctagctacaacgaaagtttct

SEQ ID NO: 19152 - DNA, 31 bp, Artificial Sequence
  Description of Artificial Sequence:  Enzymatic Nucleic Acid
ggtctcggggctagctacaacgattacaagt

SEQ ID NO: 19153 - DNA, 31 bp, Artificial Sequence
  Description of Artificial Sequence:  Enzymatic Nucleic Acid
tttttaggggctagctacaacgactcggttt

SEQ ID NO: 19154 - DNA, 31 bp, Artificial Sequence
  Description of Artificial Sequence:  Enzymatic Nucleic Acid
agactgggggctagctacaacgattttaggt

SEQ ID NO: 19155 - DNA, 31 bp, Artificial Sequence
  Description of Artificial Sequence:  Enzymatic Nucleic Acid
ctcccagaggctagctacaacgatgggtttt

SEQ ID NO: 19156 - DNA, 31 bp, Artificial Sequence
  Description of Artificial Sequence:  Enzymatic Nucleic Acid
tcatctcaggctagctacaacgatcccagac

SEQ ID NO: 19157 - DNA, 31 bp, Artificial Sequence
  Description of Artificial Sequence:  Enzymatic Nucleic Acid
tttcttcaggctagctacaacgactcactcc

SEQ ID NO: 19158 - DNA, 31 bp, Artificial Sequence
  Description of Artificial Sequence:  Enzymatic Nucleic Acid
ctcaaaaaggctagctacaacgattcttcat

SEQ ID NO: 19159 - DNA, 31 bp, Artificial Sequence
  Description of Artificial Sequence:  Enzymatic Nucleic Acid
ttaaggtgggctagctacaacgatcaaaaat

SEQ ID NO: 19160 - DNA, 31 bp, Artificial Sequence
  Description of Artificial Sequence:  Enzymatic Nucleic Acid
agttaaggggctagctacaacgagctcaaaa

SEQ ID NO: 19161 - DNA, 31 bp, Artificial Sequence
  Description of Artificial Sequence:  Enzymatic Nucleic Acid
atctatagggctagctacaacgataaggtgc

SEQ ID NO: 19162 - DNA, 31 bp, Artificial Sequence
  Description of Artificial Sequence:  Enzymatic Nucleic Acid
accatctaggctagctacaacgaagttaagg

SEQ ID NO: 19163 - DNA, 31 bp, Artificial Sequence
  Description of Artificial Sequence:  Enzymatic Nucleic Acid
ttacaccaggctagctacaacgactatagtt

SEQ ID NO: 19164 - DNA, 31 bp, Artificial Sequence
  Description of Artificial Sequence:  Enzymatic Nucleic Acid
gggttacaggctagctacaacgacatctata

SEQ ID NO: 19165 - DNA, 31 bp, Artificial Sequence
  Description of Artificial Sequence:  Enzymatic Nucleic Acid
ccgggttaggctagctacaacgaaccatcta

SEQ ID NO: 19166 - DNA, 31 bp, Artificial Sequence
  Description of Artificial Sequence:  Enzymatic Nucleic Acid
actccgggggctagctacaacgatacaccat

SEQ ID NO: 19167 - DNA, 31 bp, Artificial Sequence
  Description of Artificial Sequence:  Enzymatic Nucleic Acid
cttggtcaggctagctacaacgatccgggtt

SEQ ID NO: 19168 - DNA, 31 bp, Artificial Sequence
  Description of Artificial Sequence:  Enzymatic Nucleic Acid
atccttggggctagctacaacgacactccgg

SEQ ID NO: 19169 - DNA, 31 bp, Artificial Sequence
  Description of Artificial Sequence:  Enzymatic Nucleic Acid
gtgtacaaggctagctacaacgaccttggtc

SEQ ID NO: 19170 - DNA, 31 bp, Artificial Sequence
  Description of Artificial Sequence:  Enzymatic Nucleic Acid
caggtgtaggctagctacaacgaaatccttg

SEQ ID NO: 19171 - DNA, 31 bp, Artificial Sequence
  Description of Artificial Sequence:  Enzymatic Nucleic Acid
cacaggtgggctagctacaacgaacaatcct

SEQ ID NO: 19172 - DNA, 31 bp, Artificial Sequence
  Description of Artificial Sequence:  Enzymatic Nucleic Acid
tgcacaggggctagctacaacgagtacaatc

SEQ ID NO: 19173 - DNA, 31 bp, Artificial Sequence
  Description of Artificial Sequence:  Enzymatic Nucleic Acid
atgctgcaggctagctacaacgaaggtgtac

SEQ ID NO: 19174 - DNA, 31 bp, Artificial Sequence
  Description of Artificial Sequence:  Enzymatic Nucleic Acid
ggatgctgggctagctacaacgaacaggtgt

SEQ ID NO: 19175 - DNA, 31 bp, Artificial Sequence
  Description of Artificial Sequence:  Enzymatic Nucleic Acid
actggatgggctagctacaacgatgcacagg

SEQ ID NO: 19176 - DNA, 31 bp, Artificial Sequence
  Description of Artificial Sequence:  Enzymatic Nucleic Acid
ccactggaggctagctacaacgagctgcaca

SEQ ID NO: 19177 - DNA, 31 bp, Artificial Sequence
  Description of Artificial Sequence:  Enzymatic Nucleic Acid
tcagcccaggctagctacaacgatggatgct

SEQ ID NO: 19178 - DNA, 31 bp, Artificial Sequence
  Description of Artificial Sequence:  Enzymatic Nucleic Acid
gtcatcagggctagctacaacgaccactgga

SEQ ID NO: 19179 - DNA, 31 bp, Artificial Sequence
  Description of Artificial Sequence:  Enzymatic Nucleic Acid
cttggtcaggctagctacaacgacagcccac

SEQ ID NO: 19180 - DNA, 31 bp, Artificial Sequence
  Description of Artificial Sequence:  Enzymatic Nucleic Acid
cttcttggggctagctacaacgacatcagcc

SEQ ID NO: 19181 - DNA, 31 bp, Artificial Sequence
  Description of Artificial Sequence:  Enzymatic Nucleic Acid
atgtgctgggctagctacaacgatcttcttg

SEQ ID NO: 19182 - DNA, 31 bp, Artificial Sequence
  Description of Artificial Sequence:  Enzymatic Nucleic Acid
caaatgtgggctagctacaacgatgttcttc

SEQ ID NO: 19183 - DNA, 31 bp, Artificial Sequence
  Description of Artificial Sequence:  Enzymatic Nucleic Acid
gacaaatgggctagctacaacgagctgttct

SEQ ID NO: 19184 - DNA, 31 bp, Artificial Sequence
  Description of Artificial Sequence:  Enzymatic Nucleic Acid
ctgacaaaggctagctacaacgagtgctgtt

SEQ ID NO: 19185 - DNA, 31 bp, Artificial Sequence
  Description of Artificial Sequence:  Enzymatic Nucleic Acid
gaccctgaggctagctacaacgaaaatgtgc

SEQ ID NO: 19186 - DNA, 31 bp, Artificial Sequence
  Description of Artificial Sequence:  Enzymatic Nucleic Acid
ttcatggaggctagctacaacgacctgacaa

SEQ ID NO: 19187 - DNA, 31 bp, Artificial Sequence
  Description of Artificial Sequence:  Enzymatic Nucleic Acid
gtttttcaggctagctacaacgaggaccctg

SEQ ID NO: 19188 - DNA, 31 bp, Artificial Sequence
  Description of Artificial Sequence:  Enzymatic Nucleic Acid
acaaaaggggctagctacaacgattttcatg

SEQ ID NO: 19189 - DNA, 31 bp, Artificial Sequence
  Description of Artificial Sequence:  Enzymatic Nucleic Acid
aaaagcaaggctagctacaacgaaaaaggtt

SEQ ID NO: 19190 - DNA, 31 bp, Artificial Sequence
  Description of Artificial Sequence:  Enzymatic Nucleic Acid
tccaaaagggctagctacaacgaaacaaaag

SEQ ID NO: 19191 - DNA, 31 bp, Artificial Sequence
  Description of Artificial Sequence:  Enzymatic Nucleic Acid
ccatgccaggctagctacaacgattccaaaa

SEQ ID NO: 19192 - DNA, 31 bp, Artificial Sequence
  Description of Artificial Sequence:  Enzymatic Nucleic Acid
attccatgggctagctacaacgacacttcca

SEQ ID NO: 19193 - DNA, 31 bp, Artificial Sequence
  Description of Artificial Sequence:  Enzymatic Nucleic Acid
agattccaggctagctacaacgagccacttc

SEQ ID NO: 19194 - DNA, 31 bp, Artificial Sequence
  Description of Artificial Sequence:  Enzymatic Nucleic Acid
accagagaggctagctacaacgatccatgcc

SEQ ID NO: 19195 - DNA, 31 bp, Artificial Sequence
  Description of Artificial Sequence:  Enzymatic Nucleic Acid
ggcttccaggctagctacaacgacagagatt

SEQ ID NO: 19196 - DNA, 31 bp, Artificial Sequence
  Description of Artificial Sequence:  Enzymatic Nucleic Acid
caccgtggggctagctacaacgattccacca

SEQ ID NO: 19197 - DNA, 31 bp, Artificial Sequence
  Description of Artificial Sequence:  Enzymatic Nucleic Acid
ccccaccgggctagctacaacgaggcttcca

SEQ ID NO: 19198 - DNA, 31 bp, Artificial Sequence
  Description of Artificial Sequence:  Enzymatic Nucleic Acid
ctcccccaggctagctacaacgacgtggctt

SEQ ID NO: 19199 - DNA, 31 bp, Artificial Sequence
  Description of Artificial Sequence:  Enzymatic Nucleic Acid
ctgacacgggctagctacaacgatcccccac

SEQ ID NO: 19200 - DNA, 31 bp, Artificial Sequence
  Description of Artificial Sequence:  Enzymatic Nucleic Acid
ttctgacaggctagctacaacgagctccccc

SEQ ID NO: 19201 - DNA, 31 bp, Artificial Sequence
  Description of Artificial Sequence:  Enzymatic Nucleic Acid
gattctgaggctagctacaacgaacgctccc

SEQ ID NO: 19202 - DNA, 31 bp, Artificial Sequence
  Description of Artificial Sequence:  Enzymatic Nucleic Acid
cgcagggaggctagctacaacgatctgacac

SEQ ID NO: 19203 - DNA, 31 bp, Artificial Sequence
  Description of Artificial Sequence:  Enzymatic Nucleic Acid
gtacttcgggctagctacaacgaagggattc

SEQ ID NO: 19204 - DNA, 31 bp, Artificial Sequence
  Description of Artificial Sequence:  Enzymatic Nucleic Acid
ccaaggtaggctagctacaacgattcgcagg

SEQ ID NO: 19205 - DNA, 31 bp, Artificial Sequence
  Description of Artificial Sequence:  Enzymatic Nucleic Acid
aaccaaggggctagctacaacgaacttcgca

SEQ ID NO: 19206 - DNA, 31 bp, Artificial Sequence
  Description of Artificial Sequence:  Enzymatic Nucleic Acid
gtgggtaaggctagctacaacgacaaggtac

SEQ ID NO: 19207 - DNA, 31 bp, Artificial Sequence
  Description of Artificial Sequence:  Enzymatic Nucleic Acid
ggggtgggggctagctacaacgaaaccaagg

SEQ ID NO: 19208 - DNA, 31 bp, Artificial Sequence
  Description of Artificial Sequence:  Enzymatic Nucleic Acid
tctgggggggctagctacaacgagggtaacc

SEQ ID NO: 19209 - DNA, 31 bp, Artificial Sequence
  Description of Artificial Sequence:  Enzymatic Nucleic Acid
ccattttaggctagctacaacgattctgggg

SEQ ID NO: 19210 - DNA, 31 bp, Artificial Sequence
  Description of Artificial Sequence:  Enzymatic Nucleic Acid
ttataccaggctagctacaacgatttatttc

SEQ ID NO: 19211 - DNA, 31 bp, Artificial Sequence
  Description of Artificial Sequence:  Enzymatic Nucleic Acid
tttttataggctagctacaacgacattttat

SEQ ID NO: 19212 - DNA, 31 bp, Artificial Sequence
  Description of Artificial Sequence:  Enzymatic Nucleic Acid
catttttaggctagctacaacgaaccatttt

SEQ ID NO: 19213 - DNA, 31 bp, Artificial Sequence
  Description of Artificial Sequence:  Enzymatic Nucleic Acid
gtattccaggctagctacaacgattttatac

SEQ ID NO: 19214 - DNA, 31 bp, Artificial Sequence
  Description of Artificial Sequence:  Enzymatic Nucleic Acid
aaggggtaggctagctacaacgatccatttt

SEQ ID NO: 19215 - DNA, 31 bp, Artificial Sequence
  Description of Artificial Sequence:  Enzymatic Nucleic Acid
tcaaggggggctagctacaacgaattccatt

SEQ ID NO: 19216 - DNA, 31 bp, Artificial Sequence
  Description of Artificial Sequence:  Enzymatic Nucleic Acid
tgattggaggctagctacaacgatcaagggg

SEQ ID NO: 19217 - DNA, 31 bp, Artificial Sequence
  Description of Artificial Sequence:  Enzymatic Nucleic Acid
ttgtgtgaggctagctacaacgatggactca

SEQ ID NO: 19218 - DNA, 31 bp, Artificial Sequence
  Description of Artificial Sequence:  Enzymatic Nucleic Acid
taattgtgggctagctacaacgagattggac

SEQ ID NO: 19219 - DNA, 31 bp, Artificial Sequence
  Description of Artificial Sequence:  Enzymatic Nucleic Acid
tttaattgggctagctacaacgagtgattgg

SEQ ID NO: 19220 - DNA, 31 bp, Artificial Sequence
  Description of Artificial Sequence:  Enzymatic Nucleic Acid
cgctttaaggctagctacaacgatgtgtgat

SEQ ID NO: 19221 - DNA, 31 bp, Artificial Sequence
  Description of Artificial Sequence:  Enzymatic Nucleic Acid
atgccccgggctagctacaacgatttaattg

SEQ ID NO: 19222 - DNA, 31 bp, Artificial Sequence
  Description of Artificial Sequence:  Enzymatic Nucleic Acid
agtacatgggctagctacaacgacccgcttt

SEQ ID NO: 19223 - DNA, 31 bp, Artificial Sequence
  Description of Artificial Sequence:  Enzymatic Nucleic Acid
tcagtacaggctagctacaacgagccccgct

SEQ ID NO: 19224 - DNA, 31 bp, Artificial Sequence
  Description of Artificial Sequence:  Enzymatic Nucleic Acid
cgtcagtaggctagctacaacgaatgccccg

SEQ ID NO: 19225 - DNA, 31 bp, Artificial Sequence
  Description of Artificial Sequence:  Enzymatic Nucleic Acid
atcgtcagggctagctacaacgaacatgccc

SEQ ID NO: 19226 - DNA, 31 bp, Artificial Sequence
  Description of Artificial Sequence:  Enzymatic Nucleic Acid
cataatcgggctagctacaacgacagtacat

SEQ ID NO: 19227 - DNA, 31 bp, Artificial Sequence
  Description of Artificial Sequence:  Enzymatic Nucleic Acid
ttccataaggctagctacaacgacgtcagta

SEQ ID NO: 19228 - DNA, 31 bp, Artificial Sequence
  Description of Artificial Sequence:  Enzymatic Nucleic Acid
cacttccaggctagctacaacgaaatcgtca

SEQ ID NO: 19229 - DNA, 31 bp, Artificial Sequence
  Description of Artificial Sequence:  Enzymatic Nucleic Acid
ttcactcaggctagctacaacgattccataa

SEQ ID NO: 19230 - DNA, 31 bp, Artificial Sequence
  Description of Artificial Sequence:  Enzymatic Nucleic Acid
ctctttcaggctagctacaacgatcacttcc

SEQ ID NO: 19231 - DNA, 31 bp, Artificial Sequence
  Description of Artificial Sequence:  Enzymatic Nucleic Acid
ttcctgtgggctagctacaacgactctttca

SEQ ID NO: 19232 - DNA, 31 bp, Artificial Sequence
  Description of Artificial Sequence:  Enzymatic Nucleic Acid
atttcctgggctagctacaacgagtctcttt

SEQ ID NO: 19233 - DNA, 31 bp, Artificial Sequence
  Description of Artificial Sequence:  Enzymatic Nucleic Acid
cagtgtaaggctagctacaacgattcctgtg

SEQ ID NO: 19234 - DNA, 31 bp, Artificial Sequence
  Description of Artificial Sequence:  Enzymatic Nucleic Acid
tgacagtgggctagctacaacgaaatttcct

SEQ ID NO: 19235 - DNA, 31 bp, Artificial Sequence
  Description of Artificial Sequence:  Enzymatic Nucleic Acid
gatgacagggctagctacaacgagtaatttc

SEQ ID NO: 19236 - DNA, 31 bp, Artificial Sequence
  Description of Artificial Sequence:  Enzymatic Nucleic Acid
aaggatgaggctagctacaacgaagtgtaat

SEQ ID NO: 19237 - DNA, 31 bp, Artificial Sequence
  Description of Artificial Sequence:  Enzymatic Nucleic Acid
ggtaaggaggctagctacaacgagacagtgt

SEQ ID NO: 19238 - DNA, 31 bp, Artificial Sequence
  Description of Artificial Sequence:  Enzymatic Nucleic Acid
gggattggggctagctacaacgaaaggatga

SEQ ID NO: 19239 - DNA, 31 bp, Artificial Sequence
  Description of Artificial Sequence:  Enzymatic Nucleic Acid
aaatgggaggctagctacaacgatggtaagg

SEQ ID NO: 19240 - DNA, 31 bp, Artificial Sequence
  Description of Artificial Sequence:  Enzymatic Nucleic Acid
ctttgaaaggctagctacaacgagggattgg

SEQ ID NO: 19241 - DNA, 31 bp, Artificial Sequence
  Description of Artificial Sequence:  Enzymatic Nucleic Acid
tggctctgggctagctacaacgattctcctt

SEQ ID NO: 19242 - DNA, 31 bp, Artificial Sequence
  Description of Artificial Sequence:  Enzymatic Nucleic Acid
ccacatggggctagctacaacgatctgcttc

SEQ ID NO: 19243 - DNA, 31 bp, Artificial Sequence
  Description of Artificial Sequence:  Enzymatic Nucleic Acid
agaccacaggctagctacaacgaggctctgc

SEQ ID NO: 19244 - DNA, 31 bp, Artificial Sequence
  Description of Artificial Sequence:  Enzymatic Nucleic Acid
agagaccaggctagctacaacgaatggctct

SEQ ID NO: 19245 - DNA, 31 bp, Artificial Sequence
  Description of Artificial Sequence:  Enzymatic Nucleic Acid
cagagagaggctagctacaacgacacatggc

SEQ ID NO: 19246 - DNA, 31 bp, Artificial Sequence
  Description of Artificial Sequence:  Enzymatic Nucleic Acid
atacacaaggctagctacaacgacagagaga

SEQ ID NO: 19247 - DNA, 31 bp, Artificial Sequence
  Description of Artificial Sequence:  Enzymatic Nucleic Acid
gacatacaggctagctacaacgaaaccagag

SEQ ID NO: 19248 - DNA, 31 bp, Artificial Sequence
  Description of Artificial Sequence:  Enzymatic Nucleic Acid
gggacataggctagctacaacgaacaaccag

SEQ ID NO: 19249 - DNA, 31 bp, Artificial Sequence
  Description of Artificial Sequence:  Enzymatic Nucleic Acid
gtgggacaggctagctacaacgaacacaacc

SEQ ID NO: 19250 - DNA, 31 bp, Artificial Sequence
  Description of Artificial Sequence:  Enzymatic Nucleic Acid
gggtgggaggctagctacaacgaatacacaa

SEQ ID NO: 19251 - DNA, 31 bp, Artificial Sequence
  Description of Artificial Sequence:  Enzymatic Nucleic Acid
atctggggggctagctacaacgagggacata

SEQ ID NO: 19252 - DNA, 31 bp, Artificial Sequence
  Description of Artificial Sequence:  Enzymatic Nucleic Acid
ctcaccaaggctagctacaacgactggggtg

SEQ ID NO: 19253 - DNA, 31 bp, Artificial Sequence
  Description of Artificial Sequence:  Enzymatic Nucleic Acid
atttctcaggctagctacaacgacaatctgg

SEQ ID NO: 19254 - DNA, 31 bp, Artificial Sequence
  Description of Artificial Sequence:  Enzymatic Nucleic Acid
attagagaggctagctacaacgattctcacc

SEQ ID NO: 19255 - DNA, 31 bp, Artificial Sequence
  Description of Artificial Sequence:  Enzymatic Nucleic Acid
aggagagaggctagctacaacgatagagatt

SEQ ID NO: 19256 - DNA, 31 bp, Artificial Sequence
  Description of Artificial Sequence:  Enzymatic Nucleic Acid
ggaatccaggctagctacaacgaaggagaga

SEQ ID NO: 19257 - DNA, 31 bp, Artificial Sequence
  Description of Artificial Sequence:  Enzymatic Nucleic Acid
ggtaggaaggctagctacaacgaccacagga

SEQ ID NO: 19258 - DNA, 31 bp, Artificial Sequence
  Description of Artificial Sequence:  Enzymatic Nucleic Acid
cgtactggggctagctacaacgaaggaatcc

SEQ ID NO: 19259 - DNA, 31 bp, Artificial Sequence
  Description of Artificial Sequence:  Enzymatic Nucleic Acid
gtgccgtaggctagctacaacgatggtagga

SEQ ID NO: 19260 - DNA, 31 bp, Artificial Sequence
  Description of Artificial Sequence:  Enzymatic Nucleic Acid
tggtgccgggctagctacaacgaactggtag

SEQ ID NO: 19261 - DNA, 31 bp, Artificial Sequence
  Description of Artificial Sequence:  Enzymatic Nucleic Acid
gagtggtgggctagctacaacgacgtactgg

SEQ ID NO: 19262 - DNA, 31 bp, Artificial Sequence
  Description of Artificial Sequence:  Enzymatic Nucleic Acid
ttgagtggggctagctacaacgagccgtact

SEQ ID NO: 19263 - DNA, 31 bp, Artificial Sequence
  Description of Artificial Sequence:  Enzymatic Nucleic Acid
cgtttgagggctagctacaacgaggtgccgt

SEQ ID NO: 19264 - DNA, 31 bp, Artificial Sequence
  Description of Artificial Sequence:  Enzymatic Nucleic Acid
tgtcagcgggctagctacaacgattgagtgg

SEQ ID NO: 19265 - DNA, 31 bp, Artificial Sequence
  Description of Artificial Sequence:  Enzymatic Nucleic Acid
catgtcagggctagctacaacgagtttgagt

SEQ ID NO: 19266 - DNA, 31 bp, Artificial Sequence
  Description of Artificial Sequence:  Enzymatic Nucleic Acid
cgtacatgggctagctacaacgacagcgttt

SEQ ID NO: 19267 - DNA, 31 bp, Artificial Sequence
  Description of Artificial Sequence:  Enzymatic Nucleic Acid
accgtacaggctagctacaacgagtcagcgt

SEQ ID NO: 19268 - DNA, 31 bp, Artificial Sequence
  Description of Artificial Sequence:  Enzymatic Nucleic Acid
agaccgtaggctagctacaacgaatgtcagc

SEQ ID NO: 19269 - DNA, 31 bp, Artificial Sequence
  Description of Artificial Sequence:  Enzymatic Nucleic Acid
atagaccgggctagctacaacgaacatgtca

SEQ ID NO: 19270 - DNA, 31 bp, Artificial Sequence
  Description of Artificial Sequence:  Enzymatic Nucleic Acid
ggcatagaggctagctacaacgacgtacatg

SEQ ID NO: 19271 - DNA, 31 bp, Artificial Sequence
  Description of Artificial Sequence:  Enzymatic Nucleic Acid
gaatggcaggctagctacaacgaagaccgta

SEQ ID NO: 19272 - DNA, 31 bp, Artificial Sequence
  Description of Artificial Sequence:  Enzymatic Nucleic Acid
aggaatggggctagctacaacgaatagaccg

SEQ ID NO: 19273 - DNA, 31 bp, Artificial Sequence
  Description of Artificial Sequence:  Enzymatic Nucleic Acid
gggaggaaggctagctacaacgaggcataga

SEQ ID NO: 19274 - DNA, 31 bp, Artificial Sequence
  Description of Artificial Sequence:  Enzymatic Nucleic Acid
atgtgatgggctagctacaacgagggggagg

SEQ ID NO: 19275 - DNA, 31 bp, Artificial Sequence
  Description of Artificial Sequence:  Enzymatic Nucleic Acid
ggatgtgaggctagctacaacgagcggggga

SEQ ID NO: 19276 - DNA, 31 bp, Artificial Sequence
  Description of Artificial Sequence:  Enzymatic Nucleic Acid
agtggatgggctagctacaacgagatgcggg

SEQ ID NO: 19277 - DNA, 31 bp, Artificial Sequence
  Description of Artificial Sequence:  Enzymatic Nucleic Acid
ccagtggaggctagctacaacgagtgatgcg

SEQ ID NO: 19278 - DNA, 31 bp, Artificial Sequence
  Description of Artificial Sequence:  Enzymatic Nucleic Acid
aataccagggctagctacaacgaggatgtga

SEQ ID NO: 19279 - DNA, 31 bp, Artificial Sequence
  Description of Artificial Sequence:  Enzymatic Nucleic Acid
tgccaataggctagctacaacgacagtggat

SEQ ID NO: 19280 - DNA, 31 bp, Artificial Sequence
  Description of Artificial Sequence:  Enzymatic Nucleic Acid
actgccaaggctagctacaacgaaccagtgg

SEQ ID NO: 19281 - DNA, 31 bp, Artificial Sequence
  Description of Artificial Sequence:  Enzymatic Nucleic Acid
tccaactgggctagctacaacgacaatacca

SEQ ID NO: 19282 - DNA, 31 bp, Artificial Sequence
  Description of Artificial Sequence:  Enzymatic Nucleic Acid
tcctccaaggctagctacaacgatgccaata

SEQ ID NO: 19283 - DNA, 31 bp, Artificial Sequence
  Description of Artificial Sequence:  Enzymatic Nucleic Acid
ttggcgcaggctagctacaacgatcttcctc

SEQ ID NO: 19284 - DNA, 31 bp, Artificial Sequence
  Description of Artificial Sequence:  Enzymatic Nucleic Acid
cgttggcgggctagctacaacgaactcttcc

SEQ ID NO: 19285 - DNA, 31 bp, Artificial Sequence
  Description of Artificial Sequence:  Enzymatic Nucleic Acid
ctcgttggggctagctacaacgagcactctt

SEQ ID NO: 19286 - DNA, 31 bp, Artificial Sequence
  Description of Artificial Sequence:  Enzymatic Nucleic Acid
tgggctcgggctagctacaacgatggcgcac

SEQ ID NO: 19287 - DNA, 31 bp, Artificial Sequence
  Description of Artificial Sequence:  Enzymatic Nucleic Acid
tggctgggggctagctacaacgatcgttggc

SEQ ID NO: 19288 - DNA, 31 bp, Artificial Sequence
  Description of Artificial Sequence:  Enzymatic Nucleic Acid
cagcttggggctagctacaacgatgggctcg

SEQ ID NO: 19289 - DNA, 31 bp, Artificial Sequence
  Description of Artificial Sequence:  Enzymatic Nucleic Acid
tgagacagggctagctacaacgattggctgg

SEQ ID NO: 19290 - DNA, 31 bp, Artificial Sequence
  Description of Artificial Sequence:  Enzymatic Nucleic Acid
cactgagaggctagctacaacgaagcttggc

SEQ ID NO: 19291 - DNA, 31 bp, Artificial Sequence
  Description of Artificial Sequence:  Enzymatic Nucleic Acid
gtttgtcaggctagctacaacgatgagacag

SEQ ID NO: 19292 - DNA, 31 bp, Artificial Sequence
  Description of Artificial Sequence:  Enzymatic Nucleic Acid
tgggtttgggctagctacaacgacactgaga

SEQ ID NO: 19293 - DNA, 31 bp, Artificial Sequence
  Description of Artificial Sequence:  Enzymatic Nucleic Acid
ggtatgggggctagctacaacgattgtcact

SEQ ID NO: 19294 - DNA, 31 bp, Artificial Sequence
  Description of Artificial Sequence:  Enzymatic Nucleic Acid
caagggtaggctagctacaacgagggtttgt

SEQ ID NO: 19295 - DNA, 31 bp, Artificial Sequence
  Description of Artificial Sequence:  Enzymatic Nucleic Acid
cacaagggggctagctacaacgaatgggttt

SEQ ID NO: 19296 - DNA, 31 bp, Artificial Sequence
  Description of Artificial Sequence:  Enzymatic Nucleic Acid
attcttcaggctagctacaacgaaagggtat

SEQ ID NO: 19297 - DNA, 31 bp, Artificial Sequence
  Description of Artificial Sequence:  Enzymatic Nucleic Acid
cttctccaggctagctacaacgatcttcaca

SEQ ID NO: 19298 - DNA, 31 bp, Artificial Sequence
  Description of Artificial Sequence:  Enzymatic Nucleic Acid
cctccacaggctagctacaacgattctccat

SEQ ID NO: 19299 - DNA, 31 bp, Artificial Sequence
  Description of Artificial Sequence:  Enzymatic Nucleic Acid
gtcctccaggctagctacaacgaacttctcc

SEQ ID NO: 19300 - DNA, 31 bp, Artificial Sequence
  Description of Artificial Sequence:  Enzymatic Nucleic Acid
cctggaagggctagctacaacgacctccaca

SEQ ID NO: 19301 - DNA, 31 bp, Artificial Sequence
  Description of Artificial Sequence:  Enzymatic Nucleic Acid
caattttaggctagctacaacgattcctccc

SEQ ID NO: 19302 - DNA, 31 bp, Artificial Sequence
  Description of Artificial Sequence:  Enzymatic Nucleic Acid
aacttcaaggctagctacaacgatttatttc

SEQ ID NO: 19303 - DNA, 31 bp, Artificial Sequence
  Description of Artificial Sequence:  Enzymatic Nucleic Acid
tttattaaggctagctacaacgattcaattt

SEQ ID NO: 19304 - DNA, 31 bp, Artificial Sequence
  Description of Artificial Sequence:  Enzymatic Nucleic Acid
gatttttaggctagctacaacgataacttca

SEQ ID NO: 19305 - DNA, 31 bp, Artificial Sequence
  Description of Artificial Sequence:  Enzymatic Nucleic Acid
caaattgaggctagctacaacgattttatta

SEQ ID NO: 19306 - DNA, 31 bp, Artificial Sequence
  Description of Artificial Sequence:  Enzymatic Nucleic Acid
agagcaaaggctagctacaacgatgattttt

SEQ ID NO: 19307 - DNA, 31 bp, Artificial Sequence
  Description of Artificial Sequence:  Enzymatic Nucleic Acid
aattagagggctagctacaacgaaaattgat

SEQ ID NO: 19308 - DNA, 31 bp, Artificial Sequence
  Description of Artificial Sequence:  Enzymatic Nucleic Acid
tccttcaaggctagctacaacgatagagcaa

SEQ ID NO: 19309 - DNA, 31 bp, Artificial Sequence
  Description of Artificial Sequence:  Enzymatic Nucleic Acid
cagttttgggctagctacaacgatttttcct

SEQ ID NO: 19310 - DNA, 31 bp, Artificial Sequence
  Description of Artificial Sequence:  Enzymatic Nucleic Acid
acttacagggctagctacaacgatttgtttt

SEQ ID NO: 19311 - DNA, 31 bp, Artificial Sequence
  Description of Artificial Sequence:  Enzymatic Nucleic Acid
ggtacttaggctagctacaacgaagttttgt

SEQ ID NO: 19312 - DNA, 31 bp, Artificial Sequence
  Description of Artificial Sequence:  Enzymatic Nucleic Acid
caagggtaggctagctacaacgattacagtt

SEQ ID NO: 19313 - DNA, 31 bp, Artificial Sequence
  Description of Artificial Sequence:  Enzymatic Nucleic Acid
aacaagggggctagctacaacgaacttacag

SEQ ID NO: 19314 - DNA, 31 bp, Artificial Sequence
  Description of Artificial Sequence:  Enzymatic Nucleic Acid
ttggataaggctagctacaacgaaagggtac

SEQ ID NO: 19315 - DNA, 31 bp, Artificial Sequence
  Description of Artificial Sequence:  Enzymatic Nucleic Acid
cgcttggaggctagctacaacgaaacaaggg

SEQ ID NO: 19316 - DNA, 31 bp, Artificial Sequence
  Description of Artificial Sequence:  Enzymatic Nucleic Acid
atttgccgggctagctacaacgattggataa

SEQ ID NO: 19317 - DNA, 31 bp, Artificial Sequence
  Description of Artificial Sequence:  Enzymatic Nucleic Acid
cacatttgggctagctacaacgacgcttgga

SEQ ID NO: 19318 - DNA, 31 bp, Artificial Sequence
  Description of Artificial Sequence:  Enzymatic Nucleic Acid
ctgacacaggctagctacaacgattgccgct

SEQ ID NO: 19319 - DNA, 31 bp, Artificial Sequence
  Description of Artificial Sequence:  Enzymatic Nucleic Acid
agctgacaggctagctacaacgaatttgccg

SEQ ID NO: 19320 - DNA, 31 bp, Artificial Sequence
  Description of Artificial Sequence:  Enzymatic Nucleic Acid
aaagctgaggctagctacaacgaacatttgc

SEQ ID NO: 19321 - DNA, 31 bp, Artificial Sequence
  Description of Artificial Sequence:  Enzymatic Nucleic Acid
gtacaaagggctagctacaacgatgacacat

SEQ ID NO: 19322 - DNA, 31 bp, Artificial Sequence
  Description of Artificial Sequence:  Enzymatic Nucleic Acid
catttgtaggctagctacaacgaaaagctga

SEQ ID NO: 19323 - DNA, 31 bp, Artificial Sequence
  Description of Artificial Sequence:  Enzymatic Nucleic Acid
cacatttgggctagctacaacgaacaaagct

SEQ ID NO: 19324 - DNA, 31 bp, Artificial Sequence
  Description of Artificial Sequence:  Enzymatic Nucleic Acid
gcttcacaggctagctacaacgattgtacaa

SEQ ID NO: 19325 - DNA, 31 bp, Artificial Sequence
  Description of Artificial Sequence:  Enzymatic Nucleic Acid
ccgcttcaggctagctacaacgaatttgtac

SEQ ID NO: 19326 - DNA, 31 bp, Artificial Sequence
  Description of Artificial Sequence:  Enzymatic Nucleic Acid
gttgaccgggctagctacaacgattcacatt

SEQ ID NO: 19327 - DNA, 31 bp, Artificial Sequence
  Description of Artificial Sequence:  Enzymatic Nucleic Acid
tttgttgaggctagctacaacgacgcttcac

SEQ ID NO: 19328 - DNA, 31 bp, Artificial Sequence
  Description of Artificial Sequence:  Enzymatic Nucleic Acid
cgactttgggctagctacaacgatgaccgct

SEQ ID NO: 19329 - DNA, 31 bp, Artificial Sequence
  Description of Artificial Sequence:  Enzymatic Nucleic Acid
tctcccgaggctagctacaacgatttgttga

SEQ ID NO: 19330 - DNA, 31 bp, Artificial Sequence
  Description of Artificial Sequence:  Enzymatic Nucleic Acid
ggagatcaggctagctacaacgacctctctc

SEQ ID NO: 19331 - DNA, 31 bp, Artificial Sequence
  Description of Artificial Sequence:  Enzymatic Nucleic Acid
gaaggagaggctagctacaacgacaccctct

SEQ ID NO: 19332 - DNA, 31 bp, Artificial Sequence
  Description of Artificial Sequence:  Enzymatic Nucleic Acid
tggtcacgggctagctacaacgaggaaggag

SEQ ID NO: 19333 - DNA, 31 bp, Artificial Sequence
  Description of Artificial Sequence:  Enzymatic Nucleic Acid
cctggtcaggctagctacaacgagtggaagg

SEQ ID NO: 19334 - DNA, 31 bp, Artificial Sequence
  Description of Artificial Sequence:  Enzymatic Nucleic Acid
acccctggggctagctacaacgacacgtgga

SEQ ID NO: 19335 - DNA, 31 bp, Artificial Sequence
  Description of Artificial Sequence:  Enzymatic Nucleic Acid
tttcaggaggctagctacaacgaccctggtc

SEQ ID NO: 19336 - DNA, 31 bp, Artificial Sequence
  Description of Artificial Sequence:  Enzymatic Nucleic Acid
caaagtaaggctagctacaacgattcaggac

SEQ ID NO: 19337 - DNA, 31 bp, Artificial Sequence
  Description of Artificial Sequence:  Enzymatic Nucleic Acid
ttgcaaagggctagctacaacgaaatttcag

SEQ ID NO: 19338 - DNA, 31 bp, Artificial Sequence
  Description of Artificial Sequence:  Enzymatic Nucleic Acid
tcaggttgggctagctacaacgaaaagtaat

SEQ ID NO: 19339 - DNA, 31 bp, Artificial Sequence
  Description of Artificial Sequence:  Enzymatic Nucleic Acid
atgtcaggggctagctacaacgatgcaaagt

SEQ ID NO: 19340 - DNA, 31 bp, Artificial Sequence
  Description of Artificial Sequence:  Enzymatic Nucleic Acid
gctgcatgggctagctacaacgacaggttgc

SEQ ID NO: 19341 - DNA, 31 bp, Artificial Sequence
  Description of Artificial Sequence:  Enzymatic Nucleic Acid
gggctgcaggctagctacaacgagtcaggtt

SEQ ID NO: 19342 - DNA, 31 bp, Artificial Sequence
  Description of Artificial Sequence:  Enzymatic Nucleic Acid
gtgggctgggctagctacaacgaatgtcagg

SEQ ID NO: 19343 - DNA, 31 bp, Artificial Sequence
  Description of Artificial Sequence:  Enzymatic Nucleic Acid
tcagtgggggctagctacaacgatgcatgtc

SEQ ID NO: 19344 - DNA, 31 bp, Artificial Sequence
  Description of Artificial Sequence:  Enzymatic Nucleic Acid
ctgctcagggctagctacaacgagggctgca

SEQ ID NO: 19345 - DNA, 31 bp, Artificial Sequence
  Description of Artificial Sequence:  Enzymatic Nucleic Acid
ctctcctgggctagctacaacgatcagtggg

SEQ ID NO: 19346 - DNA, 31 bp, Artificial Sequence
  Description of Artificial Sequence:  Enzymatic Nucleic Acid
aagacacgggctagctacaacgatctcctgc

SEQ ID NO: 19347 - DNA, 31 bp, Artificial Sequence
  Description of Artificial Sequence:  Enzymatic Nucleic Acid
caaagacaggctagctacaacgagctctcct

SEQ ID NO: 19348 - DNA, 31 bp, Artificial Sequence
  Description of Artificial Sequence:  Enzymatic Nucleic Acid
cacaaagaggctagctacaacgaacgctctc

SEQ ID NO: 19349 - DNA, 31 bp, Artificial Sequence
  Description of Artificial Sequence:  Enzymatic Nucleic Acid
gtgcaccaggctagctacaacgaaaagacac

SEQ ID NO: 19350 - DNA, 31 bp, Artificial Sequence
  Description of Artificial Sequence:  Enzymatic Nucleic Acid
gcagtgcaggctagctacaacgacacaaaga

SEQ ID NO: 19351 - DNA, 31 bp, Artificial Sequence
  Description of Artificial Sequence:  Enzymatic Nucleic Acid
ctgcagtgggctagctacaacgaaccacaaa

SEQ ID NO: 19352 - DNA, 31 bp, Artificial Sequence
  Description of Artificial Sequence:  Enzymatic Nucleic Acid
gtctgcagggctagctacaacgagcaccaca

SEQ ID NO: 19353 - DNA, 31 bp, Artificial Sequence
  Description of Artificial Sequence:  Enzymatic Nucleic Acid
tctgtctgggctagctacaacgaagtgcacc

SEQ ID NO: 19354 - DNA, 31 bp, Artificial Sequence
  Description of Artificial Sequence:  Enzymatic Nucleic Acid
tagatctgggctagctacaacgactgcagtg

SEQ ID NO: 19355 - DNA, 31 bp, Artificial Sequence
  Description of Artificial Sequence:  Enzymatic Nucleic Acid
aacgtagaggctagctacaacgactgtctgc

SEQ ID NO: 19356 - DNA, 31 bp, Artificial Sequence
  Description of Artificial Sequence:  Enzymatic Nucleic Acid
ctcaaacgggctagctacaacgaagatctgt

SEQ ID NO: 19357 - DNA, 31 bp, Artificial Sequence
  Description of Artificial Sequence:  Enzymatic Nucleic Acid
ttctcaaaggctagctacaacgagtagatct

SEQ ID NO: 19358 - DNA, 31 bp, Artificial Sequence
  Description of Artificial Sequence:  Enzymatic Nucleic Acid
atgtgaggggctagctacaacgatctcaaac

SEQ ID NO: 19359 - DNA, 31 bp, Artificial Sequence
  Description of Artificial Sequence:  Enzymatic Nucleic Acid
gtaccatgggctagctacaacgagaggttct

SEQ ID NO: 19360 - DNA, 31 bp, Artificial Sequence
  Description of Artificial Sequence:  Enzymatic Nucleic Acid
ttgtaccaggctagctacaacgagtgaggtt

SEQ ID NO: 19361 - DNA, 31 bp, Artificial Sequence
  Description of Artificial Sequence:  Enzymatic Nucleic Acid
agcttgtaggctagctacaacgacatgtgag

SEQ ID NO: 19362 - DNA, 31 bp, Artificial Sequence
  Description of Artificial Sequence:  Enzymatic Nucleic Acid
caagcttgggctagctacaacgaaccatgtg

SEQ ID NO: 19363 - DNA, 31 bp, Artificial Sequence
  Description of Artificial Sequence:  Enzymatic Nucleic Acid
gggccaagggctagctacaacgattgtacca

SEQ ID NO: 19364 - DNA, 31 bp, Artificial Sequence
  Description of Artificial Sequence:  Enzymatic Nucleic Acid
gctgtgggggctagctacaacgacaagcttg

SEQ ID NO: 19365 - DNA, 31 bp, Artificial Sequence
  Description of Artificial Sequence:  Enzymatic Nucleic Acid
agaggctgggctagctacaacgagggccaag

SEQ ID NO: 19366 - DNA, 31 bp, Artificial Sequence
  Description of Artificial Sequence:  Enzymatic Nucleic Acid
ggcagaggggctagctacaacgatgtgggcc

SEQ ID NO: 19367 - DNA, 31 bp, Artificial Sequence
  Description of Artificial Sequence:  Enzymatic Nucleic Acid
tggattggggctagctacaacgaagaggctg

SEQ ID NO: 19368 - DNA, 31 bp, Artificial Sequence
  Description of Artificial Sequence:  Enzymatic Nucleic Acid
cacatggaggctagctacaacgatggcagag

SEQ ID NO: 19369 - DNA, 31 bp, Artificial Sequence
  Description of Artificial Sequence:  Enzymatic Nucleic Acid
ctcccacaggctagctacaacgaggattggc

SEQ ID NO: 19370 - DNA, 31 bp, Artificial Sequence
  Description of Artificial Sequence:  Enzymatic Nucleic Acid
ctctcccaggctagctacaacgaatggattg

SEQ ID NO: 19371 - DNA, 31 bp, Artificial Sequence
  Description of Artificial Sequence:  Enzymatic Nucleic Acid
gtgggcaaggctagctacaacgatctcccac

SEQ ID NO: 19372 - DNA, 31 bp, Artificial Sequence
  Description of Artificial Sequence:  Enzymatic Nucleic Acid
ggtgtgggggctagctacaacgaaactctcc

SEQ ID NO: 19373 - DNA, 31 bp, Artificial Sequence
  Description of Artificial Sequence:  Enzymatic Nucleic Acid
aacaggtgggctagctacaacgagggcaact

SEQ ID NO: 19374 - DNA, 31 bp, Artificial Sequence
  Description of Artificial Sequence:  Enzymatic Nucleic Acid
caaacaggggctagctacaacgagtgggcaa

SEQ ID NO: 19375 - DNA, 31 bp, Artificial Sequence
  Description of Artificial Sequence:  Enzymatic Nucleic Acid
cttgcaaaggctagctacaacgaaggtgtgg

SEQ ID NO: 19376 - DNA, 31 bp, Artificial Sequence
  Description of Artificial Sequence:  Enzymatic Nucleic Acid
agttcttgggctagctacaacgaaaacaggt

SEQ ID NO: 19377 - DNA, 31 bp, Artificial Sequence
  Description of Artificial Sequence:  Enzymatic Nucleic Acid
tatccaagggctagctacaacgatcttgcaa

SEQ ID NO: 19378 - DNA, 31 bp, Artificial Sequence
  Description of Artificial Sequence:  Enzymatic Nucleic Acid
aaagagtaggctagctacaacgaccaagttc

SEQ ID NO: 19379 - DNA, 31 bp, Artificial Sequence
  Description of Artificial Sequence:  Enzymatic Nucleic Acid
ccaaagagggctagctacaacgaatccaagt

SEQ ID NO: 19380 - DNA, 31 bp, Artificial Sequence
  Description of Artificial Sequence:  Enzymatic Nucleic Acid
gcattcaaggctagctacaacgattccaaag

SEQ ID NO: 19381 - DNA, 31 bp, Artificial Sequence
  Description of Artificial Sequence:  Enzymatic Nucleic Acid
tggtggcaggctagctacaacgatcaatttc

SEQ ID NO: 19382 - DNA, 31 bp, Artificial Sequence
  Description of Artificial Sequence:  Enzymatic Nucleic Acid
catggtggggctagctacaacgaattcaatt

SEQ ID NO: 19383 - DNA, 31 bp, Artificial Sequence
  Description of Artificial Sequence:  Enzymatic Nucleic Acid
gaacatggggctagctacaacgaggcattca

SEQ ID NO: 19384 - DNA, 31 bp, Artificial Sequence
  Description of Artificial Sequence:  Enzymatic Nucleic Acid
agagaacaggctagctacaacgaggtggcat

SEQ ID NO: 19385 - DNA, 31 bp, Artificial Sequence
  Description of Artificial Sequence:  Enzymatic Nucleic Acid
ttagagaaggctagctacaacgaatggtggc

SEQ ID NO: 19386 - DNA, 31 bp, Artificial Sequence
  Description of Artificial Sequence:  Enzymatic Nucleic Acid
ttgtgctaggctagctacaacgatagagaac

SEQ ID NO: 19387 - DNA, 31 bp, Artificial Sequence
  Description of Artificial Sequence:  Enzymatic Nucleic Acid
catttgtgggctagctacaacgatattagag

SEQ ID NO: 19388 - DNA, 31 bp, Artificial Sequence
  Description of Artificial Sequence:  Enzymatic Nucleic Acid
gtcatttgggctagctacaacgagctattag

SEQ ID NO: 19389 - DNA, 31 bp, Artificial Sequence
  Description of Artificial Sequence:  Enzymatic Nucleic Acid
aaatgtcaggctagctacaacgattgtgcta

SEQ ID NO: 19390 - DNA, 31 bp, Artificial Sequence
  Description of Artificial Sequence:  Enzymatic Nucleic Acid
tcaaaatgggctagctacaacgacatttgtg

SEQ ID NO: 19391 - DNA, 31 bp, Artificial Sequence
  Description of Artificial Sequence:  Enzymatic Nucleic Acid
gatcaaaaggctagctacaacgagtcatttg

SEQ ID NO: 19392 - DNA, 31 bp, Artificial Sequence
  Description of Artificial Sequence:  Enzymatic Nucleic Acid
ctccatgaggctagctacaacgacaaaatgt

SEQ ID NO: 19393 - DNA, 31 bp, Artificial Sequence
  Description of Artificial Sequence:  Enzymatic Nucleic Acid
aagctccaggctagctacaacgagatcaaaa

SEQ ID NO: 19394 - DNA, 31 bp, Artificial Sequence
  Description of Artificial Sequence:  Enzymatic Nucleic Acid
ttcttaagggctagctacaacgatccatgat

SEQ ID NO: 19395 - DNA, 31 bp, Artificial Sequence
  Description of Artificial Sequence:  Enzymatic Nucleic Acid
aggatgcaggctagctacaacgatcttaagc

SEQ ID NO: 19396 - DNA, 31 bp, Artificial Sequence
  Description of Artificial Sequence:  Enzymatic Nucleic Acid
caaggatgggctagctacaacgaattcttaa

SEQ ID NO: 19397 - DNA, 31 bp, Artificial Sequence
  Description of Artificial Sequence:  Enzymatic Nucleic Acid
tgcaaggaggctagctacaacgagcattctt

SEQ ID NO: 19398 - DNA, 31 bp, Artificial Sequence
  Description of Artificial Sequence:  Enzymatic Nucleic Acid
tggtcctgggctagctacaacgaaaggatgc

SEQ ID NO: 19399 - DNA, 31 bp, Artificial Sequence
  Description of Artificial Sequence:  Enzymatic Nucleic Acid
ctccttggggctagctacaacgacctgcaag

SEQ ID NO: 19400 - DNA, 31 bp, Artificial Sequence
  Description of Artificial Sequence:  Enzymatic Nucleic Acid
agacatagggctagctacaacgactccttgg

SEQ ID NO: 19401 - DNA, 31 bp, Artificial Sequence
  Description of Artificial Sequence:  Enzymatic Nucleic Acid
ggcagacaggctagctacaacgaagtctcct

SEQ ID NO: 19402 - DNA, 31 bp, Artificial Sequence
  Description of Artificial Sequence:  Enzymatic Nucleic Acid
aaggcagaggctagctacaacgaatagtctc

SEQ ID NO: 19403 - DNA, 31 bp, Artificial Sequence
  Description of Artificial Sequence:  Enzymatic Nucleic Acid
gagcaaggggctagctacaacgaagacatag

SEQ ID NO: 19404 - DNA, 31 bp, Artificial Sequence
  Description of Artificial Sequence:  Enzymatic Nucleic Acid
gtcttgagggctagctacaacgaaaggcaga

SEQ ID NO: 19405 - DNA, 31 bp, Artificial Sequence
  Description of Artificial Sequence:  Enzymatic Nucleic Acid
tcttcctgggctagctacaacgacttgagca

SEQ ID NO: 19406 - DNA, 31 bp, Artificial Sequence
  Description of Artificial Sequence:  Enzymatic Nucleic Acid
tttcttggggctagctacaacgacttcctgt

SEQ ID NO: 19407 - DNA, 31 bp, Artificial Sequence
  Description of Artificial Sequence:  Enzymatic Nucleic Acid
acgcaatgggctagctacaacgacttttctt

SEQ ID NO: 19408 - DNA, 31 bp, Artificial Sequence
  Description of Artificial Sequence:  Enzymatic Nucleic Acid
ccacgcaaggctagctacaacgagtcttttc

SEQ ID NO: 19409 - DNA, 31 bp, Artificial Sequence
  Description of Artificial Sequence:  Enzymatic Nucleic Acid
tgaccacgggctagctacaacgaaatgtctt

SEQ ID NO: 19410 - DNA, 31 bp, Artificial Sequence
  Description of Artificial Sequence:  Enzymatic Nucleic Acid
cctgaccaggctagctacaacgagcaatgtc

SEQ ID NO: 19411 - DNA, 31 bp, Artificial Sequence
  Description of Artificial Sequence:  Enzymatic Nucleic Acid
ctgcctgaggctagctacaacgacacgcaat

SEQ ID NO: 19412 - DNA, 31 bp, Artificial Sequence
  Description of Artificial Sequence:  Enzymatic Nucleic Acid
gtgagctgggctagctacaacgactgaccac

SEQ ID NO: 19413 - DNA, 31 bp, Artificial Sequence
  Description of Artificial Sequence:  Enzymatic Nucleic Acid
actgtgagggctagctacaacgatgcctgac

SEQ ID NO: 19414 - DNA, 31 bp, Artificial Sequence
  Description of Artificial Sequence:  Enzymatic Nucleic Acid
taggactgggctagctacaacgagagctgcc

SEQ ID NO: 19415 - DNA, 31 bp, Artificial Sequence
  Description of Artificial Sequence:  Enzymatic Nucleic Acid
ctctaggaggctagctacaacgatgtgagct

SEQ ID NO: 19416 - DNA, 31 bp, Artificial Sequence
  Description of Artificial Sequence:  Enzymatic Nucleic Acid
gccacacgggctagctacaacgatctaggac

SEQ ID NO: 19417 - DNA, 31 bp, Artificial Sequence
  Description of Artificial Sequence:  Enzymatic Nucleic Acid
gtgccacaggctagctacaacgagctctagg

SEQ ID NO: 19418 - DNA, 31 bp, Artificial Sequence
  Description of Artificial Sequence:  Enzymatic Nucleic Acid
gggtgccaggctagctacaacgaacgctcta

SEQ ID NO: 19419 - DNA, 31 bp, Artificial Sequence
  Description of Artificial Sequence:  Enzymatic Nucleic Acid
cgtgggtgggctagctacaacgacacacgct

SEQ ID NO: 19420 - DNA, 31 bp, Artificial Sequence
  Description of Artificial Sequence:  Enzymatic Nucleic Acid
atcgtgggggctagctacaacgagccacacg

SEQ ID NO: 19421 - DNA, 31 bp, Artificial Sequence
  Description of Artificial Sequence:  Enzymatic Nucleic Acid
tgtgatcgggctagctacaacgagggtgcca

SEQ ID NO: 19422 - DNA, 31 bp, Artificial Sequence
  Description of Artificial Sequence:  Enzymatic Nucleic Acid
tcctgtgaggctagctacaacgacgtgggtg

SEQ ID NO: 19423 - DNA, 31 bp, Artificial Sequence
  Description of Artificial Sequence:  Enzymatic Nucleic Acid
gtttcctgggctagctacaacgagatcgtgg

SEQ ID NO: 19424 - DNA, 31 bp, Artificial Sequence
  Description of Artificial Sequence:  Enzymatic Nucleic Acid
tctccaggggctagctacaacgattcctgtg

SEQ ID NO: 19425 - DNA, 31 bp, Artificial Sequence
  Description of Artificial Sequence:  Enzymatic Nucleic Acid
tcgtctgaggctagctacaacgatctccagg

SEQ ID NO: 19426 - DNA, 31 bp, Artificial Sequence
  Description of Artificial Sequence:  Enzymatic Nucleic Acid
acttgtcgggctagctacaacgactgattct

SEQ ID NO: 19427 - DNA, 31 bp, Artificial Sequence
  Description of Artificial Sequence:  Enzymatic Nucleic Acid
aatacttgggctagctacaacgacgtctgat

SEQ ID NO: 19428 - DNA, 31 bp, Artificial Sequence
  Description of Artificial Sequence:  Enzymatic Nucleic Acid
ccccaataggctagctacaacgattgtcgtc

SEQ ID NO: 19429 - DNA, 31 bp, Artificial Sequence
  Description of Artificial Sequence:  Enzymatic Nucleic Acid
ttccccaaggctagctacaacgaacttgtcg

SEQ ID NO: 19430 - DNA, 31 bp, Artificial Sequence
  Description of Artificial Sequence:  Enzymatic Nucleic Acid
cttcgatgggctagctacaacgatttcccca

SEQ ID NO: 19431 - DNA, 31 bp, Artificial Sequence
  Description of Artificial Sequence:  Enzymatic Nucleic Acid
gacttcgaggctagctacaacgagctttccc

SEQ ID NO: 19432 - DNA, 31 bp, Artificial Sequence
  Description of Artificial Sequence:  Enzymatic Nucleic Acid
gcatgagaggctagctacaacgattcgatgc

SEQ ID NO: 19433 - DNA, 31 bp, Artificial Sequence
  Description of Artificial Sequence:  Enzymatic Nucleic Acid
gccgtgcaggctagctacaacgagagacttc

SEQ ID NO: 19434 - DNA, 31 bp, Artificial Sequence
  Description of Artificial Sequence:  Enzymatic Nucleic Acid
atgccgtgggctagctacaacgaatgagact

SEQ ID NO: 19435 - DNA, 31 bp, Artificial Sequence
  Description of Artificial Sequence:  Enzymatic Nucleic Acid
agatgccgggctagctacaacgagcatgaga

SEQ ID NO: 19436 - DNA, 31 bp, Artificial Sequence
  Description of Artificial Sequence:  Enzymatic Nucleic Acid
cccagatgggctagctacaacgacgtgcatg

SEQ ID NO: 19437 - DNA, 31 bp, Artificial Sequence
  Description of Artificial Sequence:  Enzymatic Nucleic Acid
ttcccagaggctagctacaacgagccgtgca

SEQ ID NO: 19438 - DNA, 31 bp, Artificial Sequence
  Description of Artificial Sequence:  Enzymatic Nucleic Acid
gagggggaggctagctacaacgatcccagat

SEQ ID NO: 19439 - DNA, 31 bp, Artificial Sequence
  Description of Artificial Sequence:  Enzymatic Nucleic Acid
atgatctgggctagctacaacgaggaggggg

SEQ ID NO: 19440 - DNA, 31 bp, Artificial Sequence
  Description of Artificial Sequence:  Enzymatic Nucleic Acid
ccacatgaggctagctacaacgactgtggag

SEQ ID NO: 19441 - DNA, 31 bp, Artificial Sequence
  Description of Artificial Sequence:  Enzymatic Nucleic Acid
aaaccacaggctagctacaacgagatctgtg

SEQ ID NO: 19442 - DNA, 31 bp, Artificial Sequence
  Description of Artificial Sequence:  Enzymatic Nucleic Acid
ttaaaccaggctagctacaacgaatgatctg

SEQ ID NO: 19443 - DNA, 31 bp, Artificial Sequence
  Description of Artificial Sequence:  Enzymatic Nucleic Acid
tctttaaaggctagctacaacgacacatgat

SEQ ID NO: 19444 - DNA, 31 bp, Artificial Sequence
  Description of Artificial Sequence:  Enzymatic Nucleic Acid
tctcattaggctagctacaacgactttaaac

SEQ ID NO: 19445 - DNA, 31 bp, Artificial Sequence
  Description of Artificial Sequence:  Enzymatic Nucleic Acid
gggtctcaggctagctacaacgatatcttta

SEQ ID NO: 19446 - DNA, 31 bp, Artificial Sequence
  Description of Artificial Sequence:  Enzymatic Nucleic Acid
tacaagggggctagctacaacgactcattat

SEQ ID NO: 19447 - DNA, 31 bp, Artificial Sequence
  Description of Artificial Sequence:  Enzymatic Nucleic Acid
gtcttctaggctagctacaacgaaagggtct

SEQ ID NO: 19448 - DNA, 31 bp, Artificial Sequence
  Description of Artificial Sequence:  Enzymatic Nucleic Acid
tgcctgagggctagctacaacgacttctaca

SEQ ID NO: 19449 - DNA, 31 bp, Artificial Sequence
  Description of Artificial Sequence:  Enzymatic Nucleic Acid
atacaatgggctagctacaacgactgagtct

SEQ ID NO: 19450 - DNA, 31 bp, Artificial Sequence
  Description of Artificial Sequence:  Enzymatic Nucleic Acid
caatacaaggctagctacaacgagcctgagt

SEQ ID NO: 19451 - DNA, 31 bp, Artificial Sequence
  Description of Artificial Sequence:  Enzymatic Nucleic Acid
cttcaataggctagctacaacgaaatgcctg

SEQ ID NO: 19452 - DNA, 31 bp, Artificial Sequence
  Description of Artificial Sequence:  Enzymatic Nucleic Acid
tccttcaaggctagctacaacgaacaatgcc

SEQ ID NO: 19453 - DNA, 31 bp, Artificial Sequence
  Description of Artificial Sequence:  Enzymatic Nucleic Acid
ggttcccaggctagctacaacgaccttcaat

SEQ ID NO: 19454 - DNA, 31 bp, Artificial Sequence
  Description of Artificial Sequence:  Enzymatic Nucleic Acid
ggttccggggctagctacaacgatcccatcc

SEQ ID NO: 19455 - DNA, 31 bp, Artificial Sequence
  Description of Artificial Sequence:  Enzymatic Nucleic Acid
tagtgaggggctagctacaacgatccggttc

SEQ ID NO: 19456 - DNA, 31 bp, Artificial Sequence
  Description of Artificial Sequence:  Enzymatic Nucleic Acid
gcggatagggctagctacaacgagaggttcc

SEQ ID NO: 19457 - DNA, 31 bp, Artificial Sequence
  Description of Artificial Sequence:  Enzymatic Nucleic Acid
tctgcggaggctagctacaacgaagtgaggt

SEQ ID NO: 19458 - DNA, 31 bp, Artificial Sequence
  Description of Artificial Sequence:  Enzymatic Nucleic Acid
tcactctgggctagctacaacgaggatagtg

SEQ ID NO: 19459 - DNA, 31 bp, Artificial Sequence
  Description of Artificial Sequence:  Enzymatic Nucleic Acid
cttcctcaggctagctacaacgatctgcgga

SEQ ID NO: 19460 - DNA, 31 bp, Artificial Sequence
  Description of Artificial Sequence:  Enzymatic Nucleic Acid
ggccttcgggctagctacaacgacctccttc

SEQ ID NO: 19461 - DNA, 31 bp, Artificial Sequence
  Description of Artificial Sequence:  Enzymatic Nucleic Acid
tgtagaggggctagctacaacgacttcgtcc

SEQ ID NO: 19462 - DNA, 31 bp, Artificial Sequence
  Description of Artificial Sequence:  Enzymatic Nucleic Acid
ggcaggtgggctagctacaacgaagaggcct

SEQ ID NO: 19463 - DNA, 31 bp, Artificial Sequence
  Description of Artificial Sequence:  Enzymatic Nucleic Acid
ctggcaggggctagctacaacgagtagaggc

SEQ ID NO: 19464 - DNA, 31 bp, Artificial Sequence
  Description of Artificial Sequence:  Enzymatic Nucleic Acid
atgcctggggctagctacaacgaaggtgtag

SEQ ID NO: 19465 - DNA, 31 bp, Artificial Sequence
  Description of Artificial Sequence:  Enzymatic Nucleic Acid
actgcatgggctagctacaacgactggcagg

SEQ ID NO: 19466 - DNA, 31 bp, Artificial Sequence
  Description of Artificial Sequence:  Enzymatic Nucleic Acid
acactgcaggctagctacaacgagcctggca

SEQ ID NO: 19467 - DNA, 31 bp, Artificial Sequence
  Description of Artificial Sequence:  Enzymatic Nucleic Acid
gaacactgggctagctacaacgaatgcctgg

SEQ ID NO: 19468 - DNA, 31 bp, Artificial Sequence
  Description of Artificial Sequence:  Enzymatic Nucleic Acid
caagaacaggctagctacaacgatgcatgcc

SEQ ID NO: 19469 - DNA, 31 bp, Artificial Sequence
  Description of Artificial Sequence:  Enzymatic Nucleic Acid
gccaagaaggctagctacaacgaactgcatg

SEQ ID NO: 19470 - DNA, 31 bp, Artificial Sequence
  Description of Artificial Sequence:  Enzymatic Nucleic Acid
ttgcacagggctagctacaacgacaagaaca

SEQ ID NO: 19471 - DNA, 31 bp, Artificial Sequence
  Description of Artificial Sequence:  Enzymatic Nucleic Acid
cttttgcaggctagctacaacgaagccaaga

SEQ ID NO: 19472 - DNA, 31 bp, Artificial Sequence
  Description of Artificial Sequence:  Enzymatic Nucleic Acid
cacttttgggctagctacaacgaacagccaa

SEQ ID NO: 19473 - DNA, 31 bp, Artificial Sequence
  Description of Artificial Sequence:  Enzymatic Nucleic Acid
tgcctccaggctagctacaacgattttgcac

SEQ ID NO: 19474 - DNA, 31 bp, Artificial Sequence
  Description of Artificial Sequence:  Enzymatic Nucleic Acid
gaaaaatgggctagctacaacgactccactt

SEQ ID NO: 19475 - DNA, 31 bp, Artificial Sequence
  Description of Artificial Sequence:  Enzymatic Nucleic Acid
atgaaaaaggctagctacaacgagcctccac

SEQ ID NO: 19476 - DNA, 31 bp, Artificial Sequence
  Description of Artificial Sequence:  Enzymatic Nucleic Acid
ttctattaggctagctacaacgagaaaaatg

SEQ ID NO: 19477 - DNA, 31 bp, Artificial Sequence
  Description of Artificial Sequence:  Enzymatic Nucleic Acid
accttctaggctagctacaacgatatgaaaa

SEQ ID NO: 19478 - DNA, 31 bp, Artificial Sequence
  Description of Artificial Sequence:  Enzymatic Nucleic Acid
cctgggcaggctagctacaacgacttctatt

SEQ ID NO: 19479 - DNA, 31 bp, Artificial Sequence
  Description of Artificial Sequence:  Enzymatic Nucleic Acid
ttcctgggggctagctacaacgaaccttcta

SEQ ID NO: 19480 - DNA, 31 bp, Artificial Sequence
  Description of Artificial Sequence:  Enzymatic Nucleic Acid
caagttcgggctagctacaacgacttttcct

SEQ ID NO: 19481 - DNA, 31 bp, Artificial Sequence
  Description of Artificial Sequence:  Enzymatic Nucleic Acid
tttccaagggctagctacaacgatcgtcttt

SEQ ID NO: 19482 - DNA, 31 bp, Artificial Sequence
  Description of Artificial Sequence:  Enzymatic Nucleic Acid
aataatgaggctagctacaacgattccaagt

SEQ ID NO: 19483 - DNA, 31 bp, Artificial Sequence
  Description of Artificial Sequence:  Enzymatic Nucleic Acid
tagaataaggctagctacaacgagatttcca

SEQ ID NO: 19484 - DNA, 31 bp, Artificial Sequence
  Description of Artificial Sequence:  Enzymatic Nucleic Acid
tactagaaggctagctacaacgaaatgattt

SEQ ID NO: 19485 - DNA, 31 bp, Artificial Sequence
  Description of Artificial Sequence:  Enzymatic Nucleic Acid
cgtgcctaggctagctacaacgatagaataa

SEQ ID NO: 19486 - DNA, 31 bp, Artificial Sequence
  Description of Artificial Sequence:  Enzymatic Nucleic Acid
ccgccgtgggctagctacaacgactactaga

SEQ ID NO: 19487 - DNA, 31 bp, Artificial Sequence
  Description of Artificial Sequence:  Enzymatic Nucleic Acid
caccgccgggctagctacaacgagcctacta

SEQ ID NO: 19488 - DNA, 31 bp, Artificial Sequence
  Description of Artificial Sequence:  Enzymatic Nucleic Acid
aatcaccgggctagctacaacgacgtgccta

SEQ ID NO: 19489 - DNA, 31 bp, Artificial Sequence
  Description of Artificial Sequence:  Enzymatic Nucleic Acid
ggcaatcaggctagctacaacgacgccgtgc

SEQ ID NO: 19490 - DNA, 31 bp, Artificial Sequence
  Description of Artificial Sequence:  Enzymatic Nucleic Acid
catggcaaggctagctacaacgacaccgccg

SEQ ID NO: 19491 - DNA, 31 bp, Artificial Sequence
  Description of Artificial Sequence:  Enzymatic Nucleic Acid
gaacatggggctagctacaacgaaatcaccg

SEQ ID NO: 19492 - DNA, 31 bp, Artificial Sequence
  Description of Artificial Sequence:  Enzymatic Nucleic Acid
gaagaacaggctagctacaacgaggcaatca

SEQ ID NO: 19493 - DNA, 31 bp, Artificial Sequence
  Description of Artificial Sequence:  Enzymatic Nucleic Acid
cagaagaaggctagctacaacgaatggcaat

SEQ ID NO: 19494 - DNA, 31 bp, Artificial Sequence
  Description of Artificial Sequence:  Enzymatic Nucleic Acid
agaagtagggctagctacaacgacagaagaa

SEQ ID NO: 19495 - DNA, 31 bp, Artificial Sequence
  Description of Artificial Sequence:  Enzymatic Nucleic Acid
acaagaagggctagctacaacgaagccagaa

SEQ ID NO: 19496 - DNA, 31 bp, Artificial Sequence
  Description of Artificial Sequence:  Enzymatic Nucleic Acid
gatgatgaggctagctacaacgaaagaagta

SEQ ID NO: 19497 - DNA, 31 bp, Artificial Sequence
  Description of Artificial Sequence:  Enzymatic Nucleic Acid
taggatgaggctagctacaacgagacaagaa

SEQ ID NO: 19498 - DNA, 31 bp, Artificial Sequence
  Description of Artificial Sequence:  Enzymatic Nucleic Acid
ccgtaggaggctagctacaacgagatgacaa

SEQ ID NO: 19499 - DNA, 31 bp, Artificial Sequence
  Description of Artificial Sequence:  Enzymatic Nucleic Acid
acggtccgggctagctacaacgaaggatgat

SEQ ID NO: 19500 - DNA, 31 bp, Artificial Sequence
  Description of Artificial Sequence:  Enzymatic Nucleic Acid
cttaacggggctagctacaacgaccgtagga

SEQ ID NO: 19501 - DNA, 31 bp, Artificial Sequence
  Description of Artificial Sequence:  Enzymatic Nucleic Acid
ccgcttaaggctagctacaacgaggtccgta

SEQ ID NO: 19502 - DNA, 31 bp, Artificial Sequence
  Description of Artificial Sequence:  Enzymatic Nucleic Acid
ttggcccgggctagctacaacgattaacggt

SEQ ID NO: 19503 - DNA, 31 bp, Artificial Sequence
  Description of Artificial Sequence:  Enzymatic Nucleic Acid
tccattggggctagctacaacgaccgcttaa

SEQ ID NO: 19504 - DNA, 31 bp, Artificial Sequence
  Description of Artificial Sequence:  Enzymatic Nucleic Acid
cccctccaggctagctacaacgatggcccgc

SEQ ID NO: 19505 - DNA, 31 bp, Artificial Sequence
  Description of Artificial Sequence:  Enzymatic Nucleic Acid
gtcttcagggctagctacaacgatcccctcc

SEQ ID NO: 19506 - DNA, 31 bp, Artificial Sequence
  Description of Artificial Sequence:  Enzymatic Nucleic Acid
gtagcctgggctagctacaacgacttcagtt

SEQ ID NO: 19507 - DNA, 31 bp, Artificial Sequence
  Description of Artificial Sequence:  Enzymatic Nucleic Acid
acaagtagggctagctacaacgactgtcttc

SEQ ID NO: 19508 - DNA, 31 bp, Artificial Sequence
  Description of Artificial Sequence:  Enzymatic Nucleic Acid
tggacaagggctagctacaacgaagcctgtc

SEQ ID NO: 19509 - DNA, 31 bp, Artificial Sequence
  Description of Artificial Sequence:  Enzymatic Nucleic Acid
acgatggaggctagctacaacgaaagtagcc

SEQ ID NO: 19510 - DNA, 31 bp, Artificial Sequence
  Description of Artificial Sequence:  Enzymatic Nucleic Acid
catgacgaggctagctacaacgaggacaagt

SEQ ID NO: 19511 - DNA, 31 bp, Artificial Sequence
  Description of Artificial Sequence:  Enzymatic Nucleic Acid
atccatgaggctagctacaacgagatggaca

SEQ ID NO: 19512 - DNA, 31 bp, Artificial Sequence
  Description of Artificial Sequence:  Enzymatic Nucleic Acid
tggatccaggctagctacaacgagacgatgg

SEQ ID NO: 19513 - DNA, 31 bp, Artificial Sequence
  Description of Artificial Sequence:  Enzymatic Nucleic Acid
catctggaggctagctacaacgaccatgacg

SEQ ID NO: 19514 - DNA, 31 bp, Artificial Sequence
  Description of Artificial Sequence:  Enzymatic Nucleic Acid
ggagttcaggctagctacaacgactggatcc

SEQ ID NO: 19515 - DNA, 31 bp, Artificial Sequence
  Description of Artificial Sequence:  Enzymatic Nucleic Acid
aatgggagggctagctacaacgatcatctgg

SEQ ID NO: 19516 - DNA, 31 bp, Artificial Sequence
  Description of Artificial Sequence:  Enzymatic Nucleic Acid
tcatccaaggctagctacaacgagggagttc

SEQ ID NO: 19517 - DNA, 31 bp, Artificial Sequence
  Description of Artificial Sequence:  Enzymatic Nucleic Acid
aatgttcaggctagctacaacgaccaatggg

SEQ ID NO: 19518 - DNA, 31 bp, Artificial Sequence
  Description of Artificial Sequence:  Enzymatic Nucleic Acid
tcacaatgggctagctacaacgatcatccaa

SEQ ID NO: 19519 - DNA, 31 bp, Artificial Sequence
  Description of Artificial Sequence:  Enzymatic Nucleic Acid
gttcacaaggctagctacaacgagttcatcc

SEQ ID NO: 19520 - DNA, 31 bp, Artificial Sequence
  Description of Artificial Sequence:  Enzymatic Nucleic Acid
gtcgttcaggctagctacaacgaaatgttca

SEQ ID NO: 19521 - DNA, 31 bp, Artificial Sequence
  Description of Artificial Sequence:  Enzymatic Nucleic Acid
ggcagtcgggctagctacaacgatcacaatg

SEQ ID NO: 19522 - DNA, 31 bp, Artificial Sequence
  Description of Artificial Sequence:  Enzymatic Nucleic Acid
taaggcagggctagctacaacgacgttcaca

SEQ ID NO: 19523 - DNA, 31 bp, Artificial Sequence
  Description of Artificial Sequence:  Enzymatic Nucleic Acid
tcataaggggctagctacaacgaagtcgttc

SEQ ID NO: 19524 - DNA, 31 bp, Artificial Sequence
  Description of Artificial Sequence:  Enzymatic Nucleic Acid
tggcatcaggctagctacaacgaaaggcagt

SEQ ID NO: 19525 - DNA, 31 bp, Artificial Sequence
  Description of Artificial Sequence:  Enzymatic Nucleic Acid
tgctggcaggctagctacaacgacataaggc

SEQ ID NO: 19526 - DNA, 31 bp, Artificial Sequence
  Description of Artificial Sequence:  Enzymatic Nucleic Acid
tttgctggggctagctacaacgaatcataag

SEQ ID NO: 19527 - DNA, 31 bp, Artificial Sequence
  Description of Artificial Sequence:  Enzymatic Nucleic Acid
cccatttgggctagctacaacgatggcatca

SEQ ID NO: 19528 - DNA, 31 bp, Artificial Sequence
  Description of Artificial Sequence:  Enzymatic Nucleic Acid
aattcccaggctagctacaacgattgctggc

SEQ ID NO: 19529 - DNA, 31 bp, Artificial Sequence
  Description of Artificial Sequence:  Enzymatic Nucleic Acid
ctggggaaggctagctacaacgatcccattt

SEQ ID NO: 19530 - DNA, 31 bp, Artificial Sequence
  Description of Artificial Sequence:  Enzymatic Nucleic Acid
tcagccggggctagctacaacgactctgggg

SEQ ID NO: 19531 - DNA, 31 bp, Artificial Sequence
  Description of Artificial Sequence:  Enzymatic Nucleic Acid
agcttcagggctagctacaacgacggtctct

SEQ ID NO: 19532 - DNA, 31 bp, Artificial Sequence
  Description of Artificial Sequence:  Enzymatic Nucleic Acid
ttacctagggctagctacaacgattcagccg

SEQ ID NO: 19533 - DNA, 31 bp, Artificial Sequence
  Description of Artificial Sequence:  Enzymatic Nucleic Acid
gaggcttaggctagctacaacgactagcttc

SEQ ID NO: 19534 - DNA, 31 bp, Artificial Sequence
  Description of Artificial Sequence:  Enzymatic Nucleic Acid
ccaagaggggctagctacaacgattacctag

SEQ ID NO: 19535 - DNA, 31 bp, Artificial Sequence
  Description of Artificial Sequence:  Enzymatic Nucleic Acid
caccacggggctagctacaacgacaagaggc

SEQ ID NO: 19536 - DNA, 31 bp, Artificial Sequence
  Description of Artificial Sequence:  Enzymatic Nucleic Acid
aggcaccaggctagctacaacgaggccaaga

SEQ ID NO: 19537 - DNA, 31 bp, Artificial Sequence
  Description of Artificial Sequence:  Enzymatic Nucleic Acid
caaaggcaggctagctacaacgacacggcca

SEQ ID NO: 19538 - DNA, 31 bp, Artificial Sequence
  Description of Artificial Sequence:  Enzymatic Nucleic Acid
gccaaaggggctagctacaacgaaccacggc

SEQ ID NO: 19539 - DNA, 31 bp, Artificial Sequence
  Description of Artificial Sequence:  Enzymatic Nucleic Acid
tcacttggggctagctacaacgacaaaggca

SEQ ID NO: 19540 - DNA, 31 bp, Artificial Sequence
  Description of Artificial Sequence:  Enzymatic Nucleic Acid
ttcaatcaggctagctacaacgattggccaa

SEQ ID NO: 19541 - DNA, 31 bp, Artificial Sequence
  Description of Artificial Sequence:  Enzymatic Nucleic Acid
tgcttcaaggctagctacaacgacacttggc

SEQ ID NO: 19542 - DNA, 31 bp, Artificial Sequence
  Description of Artificial Sequence:  Enzymatic Nucleic Acid
ggcatctgggctagctacaacgattcaatca

SEQ ID NO: 19543 - DNA, 31 bp, Artificial Sequence
  Description of Artificial Sequence:  Enzymatic Nucleic Acid
caaaggcaggctagctacaacgactgcttca

SEQ ID NO: 19544 - DNA, 31 bp, Artificial Sequence
  Description of Artificial Sequence:  Enzymatic Nucleic Acid
tccaaaggggctagctacaacgaatctgctt

SEQ ID NO: 19545 - DNA, 31 bp, Artificial Sequence
  Description of Artificial Sequence:  Enzymatic Nucleic Acid
cttgtcaaggctagctacaacgatccaaagg

SEQ ID NO: 19546 - DNA, 31 bp, Artificial Sequence
  Description of Artificial Sequence:  Enzymatic Nucleic Acid
ctgtcttgggctagctacaacgacaattcca

SEQ ID NO: 19547 - DNA, 31 bp, Artificial Sequence
  Description of Artificial Sequence:  Enzymatic Nucleic Acid
agttgctgggctagctacaacgacttgtcaa

SEQ ID NO: 19548 - DNA, 31 bp, Artificial Sequence
  Description of Artificial Sequence:  Enzymatic Nucleic Acid
gcaagttgggctagctacaacgatgtcttgt

SEQ ID NO: 19549 - DNA, 31 bp, Artificial Sequence
  Description of Artificial Sequence:  Enzymatic Nucleic Acid
cctgcaagggctagctacaacgatgctgtct

SEQ ID NO: 19550 - DNA, 31 bp, Artificial Sequence
  Description of Artificial Sequence:  Enzymatic Nucleic Acid
ctgtcctgggctagctacaacgaaagttgct

SEQ ID NO: 19551 - DNA, 31 bp, Artificial Sequence
  Description of Artificial Sequence:  Enzymatic Nucleic Acid
tgctactgggctagctacaacgacctgcaag

SEQ ID NO: 19552 - DNA, 31 bp, Artificial Sequence
  Description of Artificial Sequence:  Enzymatic Nucleic Acid
gactgctaggctagctacaacgatgtcctgc

SEQ ID NO: 19553 - DNA, 31 bp, Artificial Sequence
  Description of Artificial Sequence:  Enzymatic Nucleic Acid
tttgactgggctagctacaacgatactgtcc

SEQ ID NO: 19554 - DNA, 31 bp, Artificial Sequence
  Description of Artificial Sequence:  Enzymatic Nucleic Acid
cattttgaggctagctacaacgatgctactg

SEQ ID NO: 19555 - DNA, 31 bp, Artificial Sequence
  Description of Artificial Sequence:  Enzymatic Nucleic Acid
tttcaacaggctagctacaacgatttgactg

SEQ ID NO: 19556 - DNA, 31 bp, Artificial Sequence
  Description of Artificial Sequence:  Enzymatic Nucleic Acid
tctttcaaggctagctacaacgaattttgac

SEQ ID NO: 19557 - DNA, 31 bp, Artificial Sequence
  Description of Artificial Sequence:  Enzymatic Nucleic Acid
gtgtgttgggctagctacaacgatccttctt

SEQ ID NO: 19558 - DNA, 31 bp, Artificial Sequence
  Description of Artificial Sequence:  Enzymatic Nucleic Acid
actgtgtgggctagctacaacgatgctcctt

SEQ ID NO: 19559 - DNA, 31 bp, Artificial Sequence
  Description of Artificial Sequence:  Enzymatic Nucleic Acid
tcactgtgggctagctacaacgagttgctcc

SEQ ID NO: 19560 - DNA, 31 bp, Artificial Sequence
  Description of Artificial Sequence:  Enzymatic Nucleic Acid
gctcactgggctagctacaacgagtgttgct

SEQ ID NO: 19561 - DNA, 31 bp, Artificial Sequence
  Description of Artificial Sequence:  Enzymatic Nucleic Acid
gatgctcaggctagctacaacgatgtgtgtt

SEQ ID NO: 19562 - DNA, 31 bp, Artificial Sequence
  Description of Artificial Sequence:  Enzymatic Nucleic Acid
gctcgatgggctagctacaacgatcactgtg

SEQ ID NO: 19563 - DNA, 31 bp, Artificial Sequence
  Description of Artificial Sequence:  Enzymatic Nucleic Acid
gagctcgaggctagctacaacgagctcactg

SEQ ID NO: 19564 - DNA, 31 bp, Artificial Sequence
  Description of Artificial Sequence:  Enzymatic Nucleic Acid
catgagagggctagctacaacgatcgatgct

SEQ ID NO: 19565 - DNA, 31 bp, Artificial Sequence
  Description of Artificial Sequence:  Enzymatic Nucleic Acid
ttcagacaggctagctacaacgagagagctc

SEQ ID NO: 19566 - DNA, 31 bp, Artificial Sequence
  Description of Artificial Sequence:  Enzymatic Nucleic Acid
agttcagaggctagctacaacgaatgagagc

SEQ ID NO: 19567 - DNA, 31 bp, Artificial Sequence
  Description of Artificial Sequence:  Enzymatic Nucleic Acid
atcttgagggctagctacaacgatcagacat

SEQ ID NO: 19568 - DNA, 31 bp, Artificial Sequence
  Description of Artificial Sequence:  Enzymatic Nucleic Acid
aatgaggaggctagctacaacgacttgagtt

SEQ ID NO: 19569 - DNA, 31 bp, Artificial Sequence
  Description of Artificial Sequence:  Enzymatic Nucleic Acid
aatatgaaggctagctacaacgagaggatct

SEQ ID NO: 19570 - DNA, 31 bp, Artificial Sequence
  Description of Artificial Sequence:  Enzymatic Nucleic Acid
gaccaataggctagctacaacgagaatgagg

SEQ ID NO: 19571 - DNA, 31 bp, Artificial Sequence
  Description of Artificial Sequence:  Enzymatic Nucleic Acid
gtgaccaaggctagctacaacgaatgaatga

SEQ ID NO: 19572 - DNA, 31 bp, Artificial Sequence
  Description of Artificial Sequence:  Enzymatic Nucleic Acid
gatggtgaggctagctacaacgacaatatga

SEQ ID NO: 19573 - DNA, 31 bp, Artificial Sequence
  Description of Artificial Sequence:  Enzymatic Nucleic Acid
tgagatggggctagctacaacgagaccaata

SEQ ID NO: 19574 - DNA, 31 bp, Artificial Sequence
  Description of Artificial Sequence:  Enzymatic Nucleic Acid
cattgagaggctagctacaacgaggtgacca

SEQ ID NO: 19575 - DNA, 31 bp, Artificial Sequence
  Description of Artificial Sequence:  Enzymatic Nucleic Acid
tgaccacaggctagctacaacgatgagatgg

SEQ ID NO: 19576 - DNA, 31 bp, Artificial Sequence
  Description of Artificial Sequence:  Enzymatic Nucleic Acid
gttgaccaggctagctacaacgaattgagat

SEQ ID NO: 19577 - DNA, 31 bp, Artificial Sequence
  Description of Artificial Sequence:  Enzymatic Nucleic Acid
aaggttgaggctagctacaacgacacattga

SEQ ID NO: 19578 - DNA, 31 bp, Artificial Sequence
  Description of Artificial Sequence:  Enzymatic Nucleic Acid
ctagaaggggctagctacaacgatgaccaca

SEQ ID NO: 19579 - DNA, 31 bp, Artificial Sequence
  Description of Artificial Sequence:  Enzymatic Nucleic Acid
tacaggcaggctagctacaacgactagaagg

SEQ ID NO: 19580 - DNA, 31 bp, Artificial Sequence
  Description of Artificial Sequence:  Enzymatic Nucleic Acid
ggtacaggggctagctacaacgaacctagaa

SEQ ID NO: 19581 - DNA, 31 bp, Artificial Sequence
  Description of Artificial Sequence:  Enzymatic Nucleic Acid
gcttggtaggctagctacaacgaaggcacct

SEQ ID NO: 19582 - DNA, 31 bp, Artificial Sequence
  Description of Artificial Sequence:  Enzymatic Nucleic Acid
tggcttggggctagctacaacgaacaggcac

SEQ ID NO: 19583 - DNA, 31 bp, Artificial Sequence
  Description of Artificial Sequence:  Enzymatic Nucleic Acid
cctcctggggctagctacaacgattggtaca

SEQ ID NO: 19584 - DNA, 31 bp, Artificial Sequence
  Description of Artificial Sequence:  Enzymatic Nucleic Acid
atgagtggggctagctacaacgacctcctgg

SEQ ID NO: 19585 - DNA, 31 bp, Artificial Sequence
  Description of Artificial Sequence:  Enzymatic Nucleic Acid
accatgagggctagctacaacgaggccctcc

SEQ ID NO: 19586 - DNA, 31 bp, Artificial Sequence
  Description of Artificial Sequence:  Enzymatic Nucleic Acid
aatcaccaggctagctacaacgagagtggcc

SEQ ID NO: 19587 - DNA, 31 bp, Artificial Sequence
  Description of Artificial Sequence:  Enzymatic Nucleic Acid
cacaatcaggctagctacaacgacatgagtg

SEQ ID NO: 19588 - DNA, 31 bp, Artificial Sequence
  Description of Artificial Sequence:  Enzymatic Nucleic Acid
ttccacaaggctagctacaacgacaccatga

SEQ ID NO: 19589 - DNA, 31 bp, Artificial Sequence
  Description of Artificial Sequence:  Enzymatic Nucleic Acid
gaattccaggctagctacaacgaaatcacca

SEQ ID NO: 19590 - DNA, 31 bp, Artificial Sequence
  Description of Artificial Sequence:  Enzymatic Nucleic Acid
ttgcagaaggctagctacaacgatccacaat

SEQ ID NO: 19591 - DNA, 31 bp, Artificial Sequence
  Description of Artificial Sequence:  Enzymatic Nucleic Acid
caaatttgggctagctacaacgaagaattcc

SEQ ID NO: 19592 - DNA, 31 bp, Artificial Sequence
  Description of Artificial Sequence:  Enzymatic Nucleic Acid
tttccaaaggctagctacaacgattgcagaa

SEQ ID NO: 19593 - DNA, 31 bp, Artificial Sequence
  Description of Artificial Sequence:  Enzymatic Nucleic Acid
tggacaggggctagctacaacgattccaaat

SEQ ID NO: 19594 - DNA, 31 bp, Artificial Sequence
  Description of Artificial Sequence:  Enzymatic Nucleic Acid
taagtggaggctagctacaacgaaggtttcc

SEQ ID NO: 19595 - DNA, 31 bp, Artificial Sequence
  Description of Artificial Sequence:  Enzymatic Nucleic Acid
caggtaagggctagctacaacgaggacaggt

SEQ ID NO: 19596 - DNA, 31 bp, Artificial Sequence
  Description of Artificial Sequence:  Enzymatic Nucleic Acid
tcctcaggggctagctacaacgaaagtggac

SEQ ID NO: 19597 - DNA, 31 bp, Artificial Sequence
  Description of Artificial Sequence:  Enzymatic Nucleic Acid
ttctcttgggctagctacaacgatcctcagg

SEQ ID NO: 19598 - DNA, 31 bp, Artificial Sequence
  Description of Artificial Sequence:  Enzymatic Nucleic Acid
caaattcaggctagctacaacgattctcttg

SEQ ID NO: 19599 - DNA, 31 bp, Artificial Sequence
  Description of Artificial Sequence:  Enzymatic Nucleic Acid
gggacaaaggctagctacaacgatcatttct

SEQ ID NO: 19600 - DNA, 31 bp, Artificial Sequence
  Description of Artificial Sequence:  Enzymatic Nucleic Acid
gtaggggaggctagctacaacgaaaattcat

SEQ ID NO: 19601 - DNA, 31 bp, Artificial Sequence
  Description of Artificial Sequence:  Enzymatic Nucleic Acid
tggtcttgggctagctacaacgaaggggaca

SEQ ID NO: 19602 - DNA, 31 bp, Artificial Sequence
  Description of Artificial Sequence:  Enzymatic Nucleic Acid
ccctttggggctagctacaacgacttgtagg

SEQ ID NO: 19603 - DNA, 31 bp, Artificial Sequence
  Description of Artificial Sequence:  Enzymatic Nucleic Acid
gaatcgtgggctagctacaacgaccctttgg

SEQ ID NO: 19604 - DNA, 31 bp, Artificial Sequence
  Description of Artificial Sequence:  Enzymatic Nucleic Acid
cggaatcgggctagctacaacgagccccttt

SEQ ID NO: 19605 - DNA, 31 bp, Artificial Sequence
  Description of Artificial Sequence:  Enzymatic Nucleic Acid
tgacggaaggctagctacaacgacgtgcccc

SEQ ID NO: 19606 - DNA, 31 bp, Artificial Sequence
  Description of Artificial Sequence:  Enzymatic Nucleic Acid
tcccttgaggctagctacaacgaggaatcgt

SEQ ID NO: 19607 - DNA, 31 bp, Artificial Sequence
  Description of Artificial Sequence:  Enzymatic Nucleic Acid
caacgtagggctagctacaacgactttccct

SEQ ID NO: 19608 - DNA, 31 bp, Artificial Sequence
  Description of Artificial Sequence:  Enzymatic Nucleic Acid
ctccaacgggctagctacaacgaagtctttc

SEQ ID NO: 19609 - DNA, 31 bp, Artificial Sequence
  Description of Artificial Sequence:  Enzymatic Nucleic Acid
tgctccaaggctagctacaacgagtagtctt

SEQ ID NO: 19610 - DNA, 31 bp, Artificial Sequence
  Description of Artificial Sequence:  Enzymatic Nucleic Acid
agggattgggctagctacaacgatccaacgt

SEQ ID NO: 19611 - DNA, 31 bp, Artificial Sequence
  Description of Artificial Sequence:  Enzymatic Nucleic Acid
cacagggaggctagctacaacgatgctccaa

SEQ ID NO: 19612 - DNA, 31 bp, Artificial Sequence
  Description of Artificial Sequence:  Enzymatic Nucleic Acid
cagatccaggctagctacaacgaagggattg

SEQ ID NO: 19613 - DNA, 31 bp, Artificial Sequence
  Description of Artificial Sequence:  Enzymatic Nucleic Acid
gtttcagaggctagctacaacgaccacaggg

SEQ ID NO: 19614 - DNA, 31 bp, Artificial Sequence
  Description of Artificial Sequence:  Enzymatic Nucleic Acid
aagcgccgggctagctacaacgattcagatc

SEQ ID NO: 19615 - DNA, 31 bp, Artificial Sequence
  Description of Artificial Sequence:  Enzymatic Nucleic Acid
tccaagcgggctagctacaacgacgtttcag

SEQ ID NO: 19616 - DNA, 31 bp, Artificial Sequence
  Description of Artificial Sequence:  Enzymatic Nucleic Acid
tgtccaagggctagctacaacgagccgtttc

SEQ ID NO: 19617 - DNA, 31 bp, Artificial Sequence
  Description of Artificial Sequence:  Enzymatic Nucleic Acid
tgatgctgggctagctacaacgaccaagcgc

SEQ ID NO: 19618 - DNA, 31 bp, Artificial Sequence
  Description of Artificial Sequence:  Enzymatic Nucleic Acid
tggtgatgggctagctacaacgatgtccaag

SEQ ID NO: 19619 - DNA, 31 bp, Artificial Sequence
  Description of Artificial Sequence:  Enzymatic Nucleic Acid
actggtgaggctagctacaacgagctgtcca

SEQ ID NO: 19620 - DNA, 31 bp, Artificial Sequence
  Description of Artificial Sequence:  Enzymatic Nucleic Acid
gctactggggctagctacaacgagatgctgt

SEQ ID NO: 19621 - DNA, 31 bp, Artificial Sequence
  Description of Artificial Sequence:  Enzymatic Nucleic Acid
tctggctaggctagctacaacgatggtgatg

SEQ ID NO: 19622 - DNA, 31 bp, Artificial Sequence
  Description of Artificial Sequence:  Enzymatic Nucleic Acid
agctctggggctagctacaacgatactggtg

SEQ ID NO: 19623 - DNA, 31 bp, Artificial Sequence
  Description of Artificial Sequence:  Enzymatic Nucleic Acid
tggctgagggctagctacaacgatctggcta

SEQ ID NO: 19624 - DNA, 31 bp, Artificial Sequence
  Description of Artificial Sequence:  Enzymatic Nucleic Acid
agagctggggctagctacaacgatgagctct

SEQ ID NO: 19625 - DNA, 31 bp, Artificial Sequence
  Description of Artificial Sequence:  Enzymatic Nucleic Acid
atccagagggctagctacaacgatggctgag

SEQ ID NO: 19626 - DNA, 31 bp, Artificial Sequence
  Description of Artificial Sequence:  Enzymatic Nucleic Acid
tccacaaaggctagctacaacgaccagagct

SEQ ID NO: 19627 - DNA, 31 bp, Artificial Sequence
  Description of Artificial Sequence:  Enzymatic Nucleic Acid
ctcctccaggctagctacaacgaaaatccag

SEQ ID NO: 19628 - DNA, 31 bp, Artificial Sequence
  Description of Artificial Sequence:  Enzymatic Nucleic Acid
ctgagggaggctagctacaacgattctcctc

SEQ ID NO: 19629 - DNA, 31 bp, Artificial Sequence
  Description of Artificial Sequence:  Enzymatic Nucleic Acid
ctacatcaggctagctacaacgatgagggac

SEQ ID NO: 19630 - DNA, 31 bp, Artificial Sequence
  Description of Artificial Sequence:  Enzymatic Nucleic Acid
cttctacaggctagctacaacgacactgagg

SEQ ID NO: 19631 - DNA, 31 bp, Artificial Sequence
  Description of Artificial Sequence:  Enzymatic Nucleic Acid
ttcttctaggctagctacaacgaatcactga

SEQ ID NO: 19632 - DNA, 31 bp, Artificial Sequence
  Description of Artificial Sequence:  Enzymatic Nucleic Acid
ttcaggagggctagctacaacgattcctctt

SEQ ID NO: 19633 - DNA, 31 bp, Artificial Sequence
  Description of Artificial Sequence:  Enzymatic Nucleic Acid
tatacagaggctagctacaacgacttcagga

SEQ ID NO: 19634 - DNA, 31 bp, Artificial Sequence
  Description of Artificial Sequence:  Enzymatic Nucleic Acid
tccttataggctagctacaacgaagatcttc

SEQ ID NO: 19635 - DNA, 31 bp, Artificial Sequence
  Description of Artificial Sequence:  Enzymatic Nucleic Acid
agtccttaggctagctacaacgaacagatct

SEQ ID NO: 19636 - DNA, 31 bp, Artificial Sequence
  Description of Artificial Sequence:  Enzymatic Nucleic Acid
tcaggaagggctagctacaacgaccttatac

SEQ ID NO: 19637 - DNA, 31 bp, Artificial Sequence
  Description of Artificial Sequence:  Enzymatic Nucleic Acid
ctccaaggggctagctacaacgacaggaagt

SEQ ID NO: 19638 - DNA, 31 bp, Artificial Sequence
  Description of Artificial Sequence:  Enzymatic Nucleic Acid
atgagatgggctagctacaacgatccaaggt

SEQ ID NO: 19639 - DNA, 31 bp, Artificial Sequence
  Description of Artificial Sequence:  Enzymatic Nucleic Acid
agatgagaggctagctacaacgagctccaag

SEQ ID NO: 19640 - DNA, 31 bp, Artificial Sequence
  Description of Artificial Sequence:  Enzymatic Nucleic Acid
gtaacagaggctagctacaacgagagatgct

SEQ ID NO: 19641 - DNA, 31 bp, Artificial Sequence
  Description of Artificial Sequence:  Enzymatic Nucleic Acid
agctgtaaggctagctacaacgaagatgaga

SEQ ID NO: 19642 - DNA, 31 bp, Artificial Sequence
  Description of Artificial Sequence:  Enzymatic Nucleic Acid
ggaagctgggctagctacaacgaaacagatg

SEQ ID NO: 19643 - DNA, 31 bp, Artificial Sequence
  Description of Artificial Sequence:  Enzymatic Nucleic Acid
cttggaagggctagctacaacgatgtaacag

SEQ ID NO: 19644 - DNA, 31 bp, Artificial Sequence
  Description of Artificial Sequence:  Enzymatic Nucleic Acid
cttagccaggctagctacaacgattggaagc

SEQ ID NO: 19645 - DNA, 31 bp, Artificial Sequence
  Description of Artificial Sequence:  Enzymatic Nucleic Acid
gcccttagggctagctacaacgacacttgga

SEQ ID NO: 19646 - DNA, 31 bp, Artificial Sequence
  Description of Artificial Sequence:  Enzymatic Nucleic Acid
actccatgggctagctacaacgaccttagcc

SEQ ID NO: 19647 - DNA, 31 bp, Artificial Sequence
  Description of Artificial Sequence:  Enzymatic Nucleic Acid
gaactccaggctagctacaacgagcccttag

SEQ ID NO: 19648 - DNA, 31 bp, Artificial Sequence
  Description of Artificial Sequence:  Enzymatic Nucleic Acid
gccaagaaggctagctacaacgatccatgcc

SEQ ID NO: 19649 - DNA, 31 bp, Artificial Sequence
  Description of Artificial Sequence:  Enzymatic Nucleic Acid
tcgcgatgggctagctacaacgacaagaact

SEQ ID NO: 19650 - DNA, 31 bp, Artificial Sequence
  Description of Artificial Sequence:  Enzymatic Nucleic Acid
tttcgcgaggctagctacaacgagccaagaa

SEQ ID NO: 19651 - DNA, 31 bp, Artificial Sequence
  Description of Artificial Sequence:  Enzymatic Nucleic Acid
cactttcgggctagctacaacgagatgccaa

SEQ ID NO: 19652 - DNA, 31 bp, Artificial Sequence
  Description of Artificial Sequence:  Enzymatic Nucleic Acid
tggatacaggctagctacaacgatttcgcga

SEQ ID NO: 19653 - DNA, 31 bp, Artificial Sequence
  Description of Artificial Sequence:  Enzymatic Nucleic Acid
tgtggataggctagctacaacgaactttcgc

SEQ ID NO: 19654 - DNA, 31 bp, Artificial Sequence
  Description of Artificial Sequence:  Enzymatic Nucleic Acid
cctgtggaggctagctacaacgaacactttc

SEQ ID NO: 19655 - DNA, 31 bp, Artificial Sequence
  Description of Artificial Sequence:  Enzymatic Nucleic Acid
ggtccctgggctagctacaacgaggatacac

SEQ ID NO: 19656 - DNA, 31 bp, Artificial Sequence
  Description of Artificial Sequence:  Enzymatic Nucleic Acid
ccgccaggggctagctacaacgaccctgtgg

SEQ ID NO: 19657 - DNA, 31 bp, Artificial Sequence
  Description of Artificial Sequence:  Enzymatic Nucleic Acid
tcgtgccgggctagctacaacgacaggtccc

SEQ ID NO: 19658 - DNA, 31 bp, Artificial Sequence
  Description of Artificial Sequence:  Enzymatic Nucleic Acid
atttcgtgggctagctacaacgacgccaggt

SEQ ID NO: 19659 - DNA, 31 bp, Artificial Sequence
  Description of Artificial Sequence:  Enzymatic Nucleic Acid
atatttcgggctagctacaacgagccgccag

SEQ ID NO: 19660 - DNA, 31 bp, Artificial Sequence
  Description of Artificial Sequence:  Enzymatic Nucleic Acid
agaggataggctagctacaacgattcgtgcc

SEQ ID NO: 19661 - DNA, 31 bp, Artificial Sequence
  Description of Artificial Sequence:  Enzymatic Nucleic Acid
taagaggaggctagctacaacgaatttcgtg

SEQ ID NO: 19662 - DNA, 31 bp, Artificial Sequence
  Description of Artificial Sequence:  Enzymatic Nucleic Acid
ttctccgaggctagctacaacgaaagaggat

SEQ ID NO: 19663 - DNA, 31 bp, Artificial Sequence
  Description of Artificial Sequence:  Enzymatic Nucleic Acid
taaccacgggctagctacaacgatcttctcc

SEQ ID NO: 19664 - DNA, 31 bp, Artificial Sequence
  Description of Artificial Sequence:  Enzymatic Nucleic Acid
tttaaccaggctagctacaacgagttcttct

SEQ ID NO: 19665 - DNA, 31 bp, Artificial Sequence
  Description of Artificial Sequence:  Enzymatic Nucleic Acid
gattttaaggctagctacaacgacacgttct

SEQ ID NO: 19666 - DNA, 31 bp, Artificial Sequence
  Description of Artificial Sequence:  Enzymatic Nucleic Acid
gtcacagaggctagctacaacgatttaacca

SEQ ID NO: 19667 - DNA, 31 bp, Artificial Sequence
  Description of Artificial Sequence:  Enzymatic Nucleic Acid
caaagtcaggctagctacaacgaagatttta

SEQ ID NO: 19668 - DNA, 31 bp, Artificial Sequence
  Description of Artificial Sequence:  Enzymatic Nucleic Acid
agccaaagggctagctacaacgacacagatt

SEQ ID NO: 19669 - DNA, 31 bp, Artificial Sequence
  Description of Artificial Sequence:  Enzymatic Nucleic Acid
gggccaagggctagctacaacgacaaagtca

SEQ ID NO: 19670 - DNA, 31 bp, Artificial Sequence
  Description of Artificial Sequence:  Enzymatic Nucleic Acid
atcccgggggctagctacaacgacaagccaa

SEQ ID NO: 19671 - DNA, 31 bp, Artificial Sequence
  Description of Artificial Sequence:  Enzymatic Nucleic Acid
tataaataggctagctacaacgacccgggcc

SEQ ID NO: 19672 - DNA, 31 bp, Artificial Sequence
  Description of Artificial Sequence:  Enzymatic Nucleic Acid
tttataaaggctagctacaacgaatcccggg

SEQ ID NO: 19673 - DNA, 31 bp, Artificial Sequence
  Description of Artificial Sequence:  Enzymatic Nucleic Acid
gatctttaggctagctacaacgaaaatatcc

SEQ ID NO: 19674 - DNA, 31 bp, Artificial Sequence
  Description of Artificial Sequence:  Enzymatic Nucleic Acid
aatctggaggctagctacaacgactttataa

SEQ ID NO: 19675 - DNA, 31 bp, Artificial Sequence
  Description of Artificial Sequence:  Enzymatic Nucleic Acid
tgacataaggctagctacaacgactggatct

SEQ ID NO: 19676 - DNA, 31 bp, Artificial Sequence
  Description of Artificial Sequence:  Enzymatic Nucleic Acid
ttctgacaggctagctacaacgaaatctgga

SEQ ID NO: 19677 - DNA, 31 bp, Artificial Sequence
  Description of Artificial Sequence:  Enzymatic Nucleic Acid
ttttctgaggctagctacaacgaataatctg

SEQ ID NO: 19678 - DNA, 31 bp, Artificial Sequence
  Description of Artificial Sequence:  Enzymatic Nucleic Acid
ggcgagcaggctagctacaacgactcctttt

SEQ ID NO: 19679 - DNA, 31 bp, Artificial Sequence
  Description of Artificial Sequence:  Enzymatic Nucleic Acid
gaggcgagggctagctacaacgaatctcctt

SEQ ID NO: 19680 - DNA, 31 bp, Artificial Sequence
  Description of Artificial Sequence:  Enzymatic Nucleic Acid
aagggaggggctagctacaacgagagcatct

SEQ ID NO: 19681 - DNA, 31 bp, Artificial Sequence
  Description of Artificial Sequence:  Enzymatic Nucleic Acid
gccatccaggctagctacaacgattcaaagg

SEQ ID NO: 19682 - DNA, 31 bp, Artificial Sequence
  Description of Artificial Sequence:  Enzymatic Nucleic Acid
tggggccaggctagctacaacgaccatttca

SEQ ID NO: 19683 - DNA, 31 bp, Artificial Sequence
  Description of Artificial Sequence:  Enzymatic Nucleic Acid
ttctggggggctagctacaacgacatccatt

SEQ ID NO: 19684 - DNA, 31 bp, Artificial Sequence
  Description of Artificial Sequence:  Enzymatic Nucleic Acid
aaaaattgggctagctacaacgattctgggg

SEQ ID NO: 19685 - DNA, 31 bp, Artificial Sequence
  Description of Artificial Sequence:  Enzymatic Nucleic Acid
gtcaaaaaggctagctacaacgatgtttctg

SEQ ID NO: 19686 - DNA, 31 bp, Artificial Sequence
  Description of Artificial Sequence:  Enzymatic Nucleic Acid
acactctgggctagctacaacgacaaaaatt

SEQ ID NO: 19687 - DNA, 31 bp, Artificial Sequence
  Description of Artificial Sequence:  Enzymatic Nucleic Acid
tgtgtacaggctagctacaacgatctgtcaa

SEQ ID NO: 19688 - DNA, 31 bp, Artificial Sequence
  Description of Artificial Sequence:  Enzymatic Nucleic Acid
attgtgtaggctagctacaacgaactctgtc

SEQ ID NO: 19689 - DNA, 31 bp, Artificial Sequence
  Description of Artificial Sequence:  Enzymatic Nucleic Acid
ggattgtgggctagctacaacgaacactctg

SEQ ID NO: 19690 - DNA, 31 bp, Artificial Sequence
  Description of Artificial Sequence:  Enzymatic Nucleic Acid
ctggattgggctagctacaacgagtacactc

SEQ ID NO: 19691 - DNA, 31 bp, Artificial Sequence
  Description of Artificial Sequence:  Enzymatic Nucleic Acid
actctggaggctagctacaacgatgtgtaca

SEQ ID NO: 19692 - DNA, 31 bp, Artificial Sequence
  Description of Artificial Sequence:  Enzymatic Nucleic Acid
agacgtcaggctagctacaacgatctggatt

SEQ ID NO: 19693 - DNA, 31 bp, Artificial Sequence
  Description of Artificial Sequence:  Enzymatic Nucleic Acid
accagacgggctagctacaacgacactctgg

SEQ ID NO: 19694 - DNA, 31 bp, Artificial Sequence
  Description of Artificial Sequence:  Enzymatic Nucleic Acid
agaccagaggctagctacaacgagtcactct

SEQ ID NO: 19695 - DNA, 31 bp, Artificial Sequence
  Description of Artificial Sequence:  Enzymatic Nucleic Acid
ccaaaagaggctagctacaacgacagacgtc

SEQ ID NO: 19696 - DNA, 31 bp, Artificial Sequence
  Description of Artificial Sequence:  Enzymatic Nucleic Acid
gcaaaacaggctagctacaacgacaaaagac

SEQ ID NO: 19697 - DNA, 31 bp, Artificial Sequence
  Description of Artificial Sequence:  Enzymatic Nucleic Acid
cagcaaaaggctagctacaacgaaccaaaag

SEQ ID NO: 19698 - DNA, 31 bp, Artificial Sequence
  Description of Artificial Sequence:  Enzymatic Nucleic Acid
tcccacagggctagctacaacgaaaaacacc

SEQ ID NO: 19699 - DNA, 31 bp, Artificial Sequence
  Description of Artificial Sequence:  Enzymatic Nucleic Acid
atttcccaggctagctacaacgaagcaaaac

SEQ ID NO: 19700 - DNA, 31 bp, Artificial Sequence
  Description of Artificial Sequence:  Enzymatic Nucleic Acid
ggaaaataggctagctacaacgattcccaca

SEQ ID NO: 19701 - DNA, 31 bp, Artificial Sequence
  Description of Artificial Sequence:  Enzymatic Nucleic Acid
aaggaaaaggctagctacaacgaatttccca

SEQ ID NO: 19702 - DNA, 31 bp, Artificial Sequence
  Description of Artificial Sequence:  Enzymatic Nucleic Acid
gagaagcaggctagctacaacgactaaggaa

SEQ ID NO: 19703 - DNA, 31 bp, Artificial Sequence
  Description of Artificial Sequence:  Enzymatic Nucleic Acid
tggagaagggctagctacaacgaacctaagg

SEQ ID NO: 19704 - DNA, 31 bp, Artificial Sequence
  Description of Artificial Sequence:  Enzymatic Nucleic Acid
ccaggataggctagctacaacgaggagaagc

SEQ ID NO: 19705 - DNA, 31 bp, Artificial Sequence
  Description of Artificial Sequence:  Enzymatic Nucleic Acid
ccccaggaggctagctacaacgaatggagaa

SEQ ID NO: 19706 - DNA, 31 bp, Artificial Sequence
  Description of Artificial Sequence:  Enzymatic Nucleic Acid
aatctttaggctagctacaacgacccaggat

SEQ ID NO: 19707 - DNA, 31 bp, Artificial Sequence
  Description of Artificial Sequence:  Enzymatic Nucleic Acid
ttcatcaaggctagctacaacgactttaccc

SEQ ID NO: 19708 - DNA, 31 bp, Artificial Sequence
  Description of Artificial Sequence:  Enzymatic Nucleic Acid
attcttcaggctagctacaacgacaatcttt

SEQ ID NO: 19709 - DNA, 31 bp, Artificial Sequence
  Description of Artificial Sequence:  Enzymatic Nucleic Acid
ctacaaaaggctagctacaacgatcttcatc

SEQ ID NO: 19710 - DNA, 31 bp, Artificial Sequence
  Description of Artificial Sequence:  Enzymatic Nucleic Acid
atcgcctaggctagctacaacgaaaaattct

SEQ ID NO: 19711 - DNA, 31 bp, Artificial Sequence
  Description of Artificial Sequence:  Enzymatic Nucleic Acid
ttcaatcgggctagctacaacgactacaaaa

SEQ ID NO: 19712 - DNA, 31 bp, Artificial Sequence
  Description of Artificial Sequence:  Enzymatic Nucleic Acid
tctttcaaggctagctacaacgacgcctaca

SEQ ID NO: 19713 - DNA, 31 bp, Artificial Sequence
  Description of Artificial Sequence:  Enzymatic Nucleic Acid
cattctagggctagctacaacgatccttctt

SEQ ID NO: 19714 - DNA, 31 bp, Artificial Sequence
  Description of Artificial Sequence:  Enzymatic Nucleic Acid
ggccctcaggctagctacaacgatctagttc

SEQ ID NO: 19715 - DNA, 31 bp, Artificial Sequence
  Description of Artificial Sequence:  Enzymatic Nucleic Acid
atcaggggggctagctacaacgacctcattc

SEQ ID NO: 19716 - DNA, 31 bp, Artificial Sequence
  Description of Artificial Sequence:  Enzymatic Nucleic Acid
tagtataaggctagctacaacgacaggggcc

SEQ ID NO: 19717 - DNA, 31 bp, Artificial Sequence
  Description of Artificial Sequence:  Enzymatic Nucleic Acid
gtgtagtaggctagctacaacgaaatcaggg

SEQ ID NO: 19718 - DNA, 31 bp, Artificial Sequence
  Description of Artificial Sequence:  Enzymatic Nucleic Acid
tggtgtagggctagctacaacgaataatcag

SEQ ID NO: 19719 - DNA, 31 bp, Artificial Sequence
  Description of Artificial Sequence:  Enzymatic Nucleic Acid
ttctggtgggctagctacaacgaagtataat

SEQ ID NO: 19720 - DNA, 31 bp, Artificial Sequence
  Description of Artificial Sequence:  Enzymatic Nucleic Acid
atttctggggctagctacaacgagtagtata

SEQ ID NO: 19721 - DNA, 31 bp, Artificial Sequence
  Description of Artificial Sequence:  Enzymatic Nucleic Acid
ctggtacaggctagctacaacgattctggtg

SEQ ID NO: 19722 - DNA, 31 bp, Artificial Sequence
  Description of Artificial Sequence:  Enzymatic Nucleic Acid
gtctggtaggctagctacaacgaatttctgg

SEQ ID NO: 19723 - DNA, 31 bp, Artificial Sequence
  Description of Artificial Sequence:  Enzymatic Nucleic Acid
tggtctggggctagctacaacgaacatttct

SEQ ID NO: 19724 - DNA, 31 bp, Artificial Sequence
  Description of Artificial Sequence:  Enzymatic Nucleic Acid
cagcatggggctagctacaacgactggtaca

SEQ ID NO: 19725 - DNA, 31 bp, Artificial Sequence
  Description of Artificial Sequence:  Enzymatic Nucleic Acid
gtccagcaggctagctacaacgaggtctggt

SEQ ID NO: 19726 - DNA, 31 bp, Artificial Sequence
  Description of Artificial Sequence:  Enzymatic Nucleic Acid
cagtccagggctagctacaacgaatggtctg

SEQ ID NO: 19727 - DNA, 31 bp, Artificial Sequence
  Description of Artificial Sequence:  Enzymatic Nucleic Acid
cgtgccagggctagctacaacgaagtccagc

SEQ ID NO: 19728 - DNA, 31 bp, Artificial Sequence
  Description of Artificial Sequence:  Enzymatic Nucleic Acid
tccccgtgggctagctacaacgacagcagtc

SEQ ID NO: 19729 - DNA, 31 bp, Artificial Sequence
  Description of Artificial Sequence:  Enzymatic Nucleic Acid
gctccccgggctagctacaacgagccagcag

SEQ ID NO: 19730 - DNA, 31 bp, Artificial Sequence
  Description of Artificial Sequence:  Enzymatic Nucleic Acid
tgactgggggctagctacaacgatccccgtg

SEQ ID NO: 19731 - DNA, 31 bp, Artificial Sequence
  Description of Artificial Sequence:  Enzymatic Nucleic Acid
gtctctgaggctagctacaacgatgggctcc

SEQ ID NO: 19732 - DNA, 31 bp, Artificial Sequence
  Description of Artificial Sequence:  Enzymatic Nucleic Acid
aacgtgggggctagctacaacgactctgact

SEQ ID NO: 19733 - DNA, 31 bp, Artificial Sequence
  Description of Artificial Sequence:  Enzymatic Nucleic Acid
tgaaaacgggctagctacaacgagggtctct

SEQ ID NO: 19734 - DNA, 31 bp, Artificial Sequence
  Description of Artificial Sequence:  Enzymatic Nucleic Acid
tctgaaaaggctagctacaacgagtgggtct

SEQ ID NO: 19735 - DNA, 31 bp, Artificial Sequence
  Description of Artificial Sequence:  Enzymatic Nucleic Acid
tccaccaaggctagctacaacgatctgaaaa

SEQ ID NO: 19736 - DNA, 31 bp, Artificial Sequence
  Description of Artificial Sequence:  Enzymatic Nucleic Acid
atgttccaggctagctacaacgacaactctg

SEQ ID NO: 19737 - DNA, 31 bp, Artificial Sequence
  Description of Artificial Sequence:  Enzymatic Nucleic Acid
cccaaatgggctagctacaacgatccaccaa

SEQ ID NO: 19738 - DNA, 31 bp, Artificial Sequence
  Description of Artificial Sequence:  Enzymatic Nucleic Acid
ttcccaaaggctagctacaacgagttccacc

SEQ ID NO: 19739 - DNA, 31 bp, Artificial Sequence
  Description of Artificial Sequence:  Enzymatic Nucleic Acid
gcaagagaggctagctacaacgattcccaaa

SEQ ID NO: 19740 - DNA, 31 bp, Artificial Sequence
  Description of Artificial Sequence:  Enzymatic Nucleic Acid
ttagcttgggctagctacaacgaaagagatt

SEQ ID NO: 19741 - DNA, 31 bp, Artificial Sequence
  Description of Artificial Sequence:  Enzymatic Nucleic Acid
agcattagggctagctacaacgattgcaaga

SEQ ID NO: 19742 - DNA, 31 bp, Artificial Sequence
  Description of Artificial Sequence:  Enzymatic Nucleic Acid
gctgagcaggctagctacaacgatagcttgc

SEQ ID NO: 19743 - DNA, 31 bp, Artificial Sequence
  Description of Artificial Sequence:  Enzymatic Nucleic Acid
ctgctgagggctagctacaacgaattagctt

SEQ ID NO: 19744 - DNA, 31 bp, Artificial Sequence
  Description of Artificial Sequence:  Enzymatic Nucleic Acid
ccatcctgggctagctacaacgatgagcatt

SEQ ID NO: 19745 - DNA, 31 bp, Artificial Sequence
  Description of Artificial Sequence:  Enzymatic Nucleic Acid
ctttgccaggctagctacaacgacctgctga

SEQ ID NO: 19746 - DNA, 31 bp, Artificial Sequence
  Description of Artificial Sequence:  Enzymatic Nucleic Acid
agtctttgggctagctacaacgacatcctgc

SEQ ID NO: 19747 - DNA, 31 bp, Artificial Sequence
  Description of Artificial Sequence:  Enzymatic Nucleic Acid
caatgtagggctagctacaacgactttgcca

SEQ ID NO: 19748 - DNA, 31 bp, Artificial Sequence
  Description of Artificial Sequence:  Enzymatic Nucleic Acid
gaacaatgggctagctacaacgaagtctttg

SEQ ID NO: 19749 - DNA, 31 bp, Artificial Sequence
  Description of Artificial Sequence:  Enzymatic Nucleic Acid
aagaacaaggctagctacaacgagtagtctt

SEQ ID NO: 19750 - DNA, 31 bp, Artificial Sequence
  Description of Artificial Sequence:  Enzymatic Nucleic Acid
cggaagaaggctagctacaacgaaatgtagt

SEQ ID NO: 19751 - DNA, 31 bp, Artificial Sequence
  Description of Artificial Sequence:  Enzymatic Nucleic Acid
ctctgataggctagctacaacgacggaagaa

SEQ ID NO: 19752 - DNA, 31 bp, Artificial Sequence
  Description of Artificial Sequence:  Enzymatic Nucleic Acid
gtctctgaggctagctacaacgaatcggaag

SEQ ID NO: 19753 - DNA, 31 bp, Artificial Sequence
  Description of Artificial Sequence:  Enzymatic Nucleic Acid
gctcaaagggctagctacaacgactctgata

SEQ ID NO: 19754 - DNA, 31 bp, Artificial Sequence
  Description of Artificial Sequence:  Enzymatic Nucleic Acid
cttccatgggctagctacaacgatcaaagtc

SEQ ID NO: 19755 - DNA, 31 bp, Artificial Sequence
  Description of Artificial Sequence:  Enzymatic Nucleic Acid
ctcttccaggctagctacaacgagctcaaag

SEQ ID NO: 19756 - DNA, 31 bp, Artificial Sequence
  Description of Artificial Sequence:  Enzymatic Nucleic Acid
gtccagaaggctagctacaacgacctcttcc

SEQ ID NO: 19757 - DNA, 31 bp, Artificial Sequence
  Description of Artificial Sequence:  Enzymatic Nucleic Acid
agagagagggctagctacaacgaccagaatc

SEQ ID NO: 19758 - DNA, 31 bp, Artificial Sequence
  Description of Artificial Sequence:  Enzymatic Nucleic Acid
gaggtaggggctagctacaacgaagagagag

SEQ ID NO: 19759 - DNA, 31 bp, Artificial Sequence
  Description of Artificial Sequence:  Enzymatic Nucleic Acid
aggtgaggggctagctacaacgaaggcagag

SEQ ID NO: 19760 - DNA, 31 bp, Artificial Sequence
  Description of Artificial Sequence:  Enzymatic Nucleic Acid
gaaacaggggctagctacaacgagaggtagg

SEQ ID NO: 19761 - DNA, 31 bp, Artificial Sequence
  Description of Artificial Sequence:  Enzymatic Nucleic Acid
acaggaaaggctagctacaacgaaggtgagg

SEQ ID NO: 19762 - DNA, 31 bp, Artificial Sequence
  Description of Artificial Sequence:  Enzymatic Nucleic Acid
cctccataggctagctacaacgaaggaaaca

SEQ ID NO: 19763 - DNA, 31 bp, Artificial Sequence
  Description of Artificial Sequence:  Enzymatic Nucleic Acid
ctcctccaggctagctacaacgaacaggaaa

SEQ ID NO: 19764 - DNA, 31 bp, Artificial Sequence
  Description of Artificial Sequence:  Enzymatic Nucleic Acid
gtcacataggctagctacaacgattcctcct

SEQ ID NO: 19765 - DNA, 31 bp, Artificial Sequence
  Description of Artificial Sequence:  Enzymatic Nucleic Acid
gggtcacaggctagctacaacgaacttcctc

SEQ ID NO: 19766 - DNA, 31 bp, Artificial Sequence
  Description of Artificial Sequence:  Enzymatic Nucleic Acid
tggggtcaggctagctacaacgaatacttcc

SEQ ID NO: 19767 - DNA, 31 bp, Artificial Sequence
  Description of Artificial Sequence:  Enzymatic Nucleic Acid
atttggggggctagctacaacgacacatact

SEQ ID NO: 19768 - DNA, 31 bp, Artificial Sequence
  Description of Artificial Sequence:  Enzymatic Nucleic Acid
taatggaaggctagctacaacgattggggtc

SEQ ID NO: 19769 - DNA, 31 bp, Artificial Sequence
  Description of Artificial Sequence:  Enzymatic Nucleic Acid
tgtcataaggctagctacaacgaggaatttg

SEQ ID NO: 19770 - DNA, 31 bp, Artificial Sequence
  Description of Artificial Sequence:  Enzymatic Nucleic Acid
tgttgtcaggctagctacaacgaaatggaat

SEQ ID NO: 19771 - DNA, 31 bp, Artificial Sequence
  Description of Artificial Sequence:  Enzymatic Nucleic Acid
ctgtgttgggctagctacaacgacataatgg

SEQ ID NO: 19772 - DNA, 31 bp, Artificial Sequence
  Description of Artificial Sequence:  Enzymatic Nucleic Acid
ctgctgtgggctagctacaacgatgtcataa

SEQ ID NO: 19773 - DNA, 31 bp, Artificial Sequence
  Description of Artificial Sequence:  Enzymatic Nucleic Acid
tcctgctgggctagctacaacgagttgtcat

SEQ ID NO: 19774 - DNA, 31 bp, Artificial Sequence
  Description of Artificial Sequence:  Enzymatic Nucleic Acid
gattcctgggctagctacaacgatgtgttgt

SEQ ID NO: 19775 - DNA, 31 bp, Artificial Sequence
  Description of Artificial Sequence:  Enzymatic Nucleic Acid
ctgactgaggctagctacaacgatcctgctg

SEQ ID NO: 19776 - DNA, 31 bp, Artificial Sequence
  Description of Artificial Sequence:  Enzymatic Nucleic Acid
gatactgaggctagctacaacgatgattcct

SEQ ID NO: 19777 - DNA, 31 bp, Artificial Sequence
  Description of Artificial Sequence:  Enzymatic Nucleic Acid
tgcagataggctagctacaacgatgactgat

SEQ ID NO: 19778 - DNA, 31 bp, Artificial Sequence
  Description of Artificial Sequence:  Enzymatic Nucleic Acid
tctgcagaggctagctacaacgaactgactg

SEQ ID NO: 19779 - DNA, 31 bp, Artificial Sequence
  Description of Artificial Sequence:  Enzymatic Nucleic Acid
ctgttctgggctagctacaacgaagatactg

SEQ ID NO: 19780 - DNA, 31 bp, Artificial Sequence
  Description of Artificial Sequence:  Enzymatic Nucleic Acid
gcttactgggctagctacaacgatctgcaga

SEQ ID NO: 19781 - DNA, 31 bp, Artificial Sequence
  Description of Artificial Sequence:  Enzymatic Nucleic Acid
ttcgcttaggctagctacaacgatgttctgc

SEQ ID NO: 19782 - DNA, 31 bp, Artificial Sequence
  Description of Artificial Sequence:  Enzymatic Nucleic Acid
ctctttcgggctagctacaacgattactgtt

SEQ ID NO: 19783 - DNA, 31 bp, Artificial Sequence
  Description of Artificial Sequence:  Enzymatic Nucleic Acid
caggccggggctagctacaacgatctttcgc

SEQ ID NO: 19784 - DNA, 31 bp, Artificial Sequence
  Description of Artificial Sequence:  Enzymatic Nucleic Acid
ctcacaggggctagctacaacgacggctctt

SEQ ID NO: 19785 - DNA, 31 bp, Artificial Sequence
  Description of Artificial Sequence:  Enzymatic Nucleic Acid
tacactcaggctagctacaacgaaggccggc

SEQ ID NO: 19786 - DNA, 31 bp, Artificial Sequence
  Description of Artificial Sequence:  Enzymatic Nucleic Acid
tttttacaggctagctacaacgatcacaggc

SEQ ID NO: 19787 - DNA, 31 bp, Artificial Sequence
  Description of Artificial Sequence:  Enzymatic Nucleic Acid
tgtttttaggctagctacaacgaactcacag

SEQ ID NO: 19788 - DNA, 31 bp, Artificial Sequence
  Description of Artificial Sequence:  Enzymatic Nucleic Acid
ttcaaatgggctagctacaacgattttacac

SEQ ID NO: 19789 - DNA, 31 bp, Artificial Sequence
  Description of Artificial Sequence:  Enzymatic Nucleic Acid
tcttcaaaggctagctacaacgagtttttac

SEQ ID NO: 19790 - DNA, 31 bp, Artificial Sequence
  Description of Artificial Sequence:  Enzymatic Nucleic Acid
acgggataggctagctacaacgacttcaaat

SEQ ID NO: 19791 - DNA, 31 bp, Artificial Sequence
  Description of Artificial Sequence:  Enzymatic Nucleic Acid
taacgggaggctagctacaacgaatcttcaa

SEQ ID NO: 19792 - DNA, 31 bp, Artificial Sequence
  Description of Artificial Sequence:  Enzymatic Nucleic Acid
tcttctaaggctagctacaacgagggatatc

SEQ ID NO: 19793 - DNA, 31 bp, Artificial Sequence
  Description of Artificial Sequence:  Enzymatic Nucleic Acid
acttctggggctagctacaacgatcttctaa

SEQ ID NO: 19794 - DNA, 31 bp, Artificial Sequence
  Description of Artificial Sequence:  Enzymatic Nucleic Acid
tacttttaggctagctacaacgattctggtt

SEQ ID NO: 19795 - DNA, 31 bp, Artificial Sequence
  Description of Artificial Sequence:  Enzymatic Nucleic Acid
tgggattaggctagctacaacgattttactt

SEQ ID NO: 19796 - DNA, 31 bp, Artificial Sequence
  Description of Artificial Sequence:  Enzymatic Nucleic Acid
atctgggaggctagctacaacgatactttta

SEQ ID NO: 19797 - DNA, 31 bp, Artificial Sequence
  Description of Artificial Sequence:  Enzymatic Nucleic Acid
ggttgtcaggctagctacaacgactgggatt

SEQ ID NO: 19798 - DNA, 31 bp, Artificial Sequence
  Description of Artificial Sequence:  Enzymatic Nucleic Acid
tctggttgggctagctacaacgacatctggg

SEQ ID NO: 19799 - DNA, 31 bp, Artificial Sequence
  Description of Artificial Sequence:  Enzymatic Nucleic Acid
ccgtctggggctagctacaacgatgtcatct

SEQ ID NO: 19800 - DNA, 31 bp, Artificial Sequence
  Description of Artificial Sequence:  Enzymatic Nucleic Acid
actgtccgggctagctacaacgactggttgt

SEQ ID NO: 19801 - DNA, 31 bp, Artificial Sequence
  Description of Artificial Sequence:  Enzymatic Nucleic Acid
taccactgggctagctacaacgaccgtctgg

SEQ ID NO: 19802 - DNA, 31 bp, Artificial Sequence
  Description of Artificial Sequence:  Enzymatic Nucleic Acid
ccataccaggctagctacaacgatgtccgtc

SEQ ID NO: 19803 - DNA, 31 bp, Artificial Sequence
  Description of Artificial Sequence:  Enzymatic Nucleic Acid
gaaccataggctagctacaacgacactgtcc

SEQ ID NO: 19804 - DNA, 31 bp, Artificial Sequence
  Description of Artificial Sequence:  Enzymatic Nucleic Acid
aagaaccaggctagctacaacgaaccactgt

SEQ ID NO: 19805 - DNA, 31 bp, Artificial Sequence
  Description of Artificial Sequence:  Enzymatic Nucleic Acid
ggcaagaaggctagctacaacgacataccac

SEQ ID NO: 19806 - DNA, 31 bp, Artificial Sequence
  Description of Artificial Sequence:  Enzymatic Nucleic Acid
ttctgaggggctagctacaacgaaagaacca

SEQ ID NO: 19807 - DNA, 31 bp, Artificial Sequence
  Description of Artificial Sequence:  Enzymatic Nucleic Acid
gttttcagggctagctacaacgatcttctga

SEQ ID NO: 19808 - DNA, 31 bp, Artificial Sequence
  Description of Artificial Sequence:  Enzymatic Nucleic Acid
ttccaaagggctagctacaacgatttcagct

SEQ ID NO: 19809 - DNA, 31 bp, Artificial Sequence
  Description of Artificial Sequence:  Enzymatic Nucleic Acid
tggttctgggctagctacaacgacttccaaa

SEQ ID NO: 19810 - DNA, 31 bp, Artificial Sequence
  Description of Artificial Sequence:  Enzymatic Nucleic Acid
taatttggggctagctacaacgatctgtctt

SEQ ID NO: 19811 - DNA, 31 bp, Artificial Sequence
  Description of Artificial Sequence:  Enzymatic Nucleic Acid
ggagataaggctagctacaacgattggttct

SEQ ID NO: 19812 - DNA, 31 bp, Artificial Sequence
  Description of Artificial Sequence:  Enzymatic Nucleic Acid
gatggagaggctagctacaacgaaatttggt

SEQ ID NO: 19813 - DNA, 31 bp, Artificial Sequence
  Description of Artificial Sequence:  Enzymatic Nucleic Acid
ccaaaagaggctagctacaacgaggagataa

SEQ ID NO: 19814 - DNA, 31 bp, Artificial Sequence
  Description of Artificial Sequence:  Enzymatic Nucleic Acid
ccattccaggctagctacaacgacaaaagat

SEQ ID NO: 19815 - DNA, 31 bp, Artificial Sequence
  Description of Artificial Sequence:  Enzymatic Nucleic Acid
gggcaccaggctagctacaacgatccaccaa

SEQ ID NO: 19816 - DNA, 31 bp, Artificial Sequence
  Description of Artificial Sequence:  Enzymatic Nucleic Acid
gctgggcaggctagctacaacgacattccac

SEQ ID NO: 19817 - DNA, 31 bp, Artificial Sequence
  Description of Artificial Sequence:  Enzymatic Nucleic Acid
ttgctgggggctagctacaacgaaccattcc

SEQ ID NO: 19818 - DNA, 31 bp, Artificial Sequence
  Description of Artificial Sequence:  Enzymatic Nucleic Acid
tgcttttgggctagctacaacgatgggcacc

SEQ ID NO: 19819 - DNA, 31 bp, Artificial Sequence
  Description of Artificial Sequence:  Enzymatic Nucleic Acid
actccctgggctagctacaacgattttgctg

SEQ ID NO: 19820 - DNA, 31 bp, Artificial Sequence
  Description of Artificial Sequence:  Enzymatic Nucleic Acid
gccacagaggctagctacaacgatccctgct

SEQ ID NO: 19821 - DNA, 31 bp, Artificial Sequence
  Description of Artificial Sequence:  Enzymatic Nucleic Acid
agatgccaggctagctacaacgaagactccc

SEQ ID NO: 19822 - DNA, 31 bp, Artificial Sequence
  Description of Artificial Sequence:  Enzymatic Nucleic Acid
ttcagatgggctagctacaacgacacagact

SEQ ID NO: 19823 - DNA, 31 bp, Artificial Sequence
  Description of Artificial Sequence:  Enzymatic Nucleic Acid
ccttcagaggctagctacaacgagccacaga

SEQ ID NO: 19824 - DNA, 31 bp, Artificial Sequence
  Description of Artificial Sequence:  Enzymatic Nucleic Acid
ggtttgagggctagctacaacgacttcagat

SEQ ID NO: 19825 - DNA, 31 bp, Artificial Sequence
  Description of Artificial Sequence:  Enzymatic Nucleic Acid
ttgtctggggctagctacaacgattgagcct

SEQ ID NO: 19826 - DNA, 31 bp, Artificial Sequence
  Description of Artificial Sequence:  Enzymatic Nucleic Acid
gccgcttgggctagctacaacgactggtttg

SEQ ID NO: 19827 - DNA, 31 bp, Artificial Sequence
  Description of Artificial Sequence:  Enzymatic Nucleic Acid
ggtagccgggctagctacaacgattgtctgg

SEQ ID NO: 19828 - DNA, 31 bp, Artificial Sequence
  Description of Artificial Sequence:  Enzymatic Nucleic Acid
actggtagggctagctacaacgacgcttgtc

SEQ ID NO: 19829 - DNA, 31 bp, Artificial Sequence
  Description of Artificial Sequence:  Enzymatic Nucleic Acid
cggactggggctagctacaacgaagccgctt

SEQ ID NO: 19830 - DNA, 31 bp, Artificial Sequence
  Description of Artificial Sequence:  Enzymatic Nucleic Acid
tatccggaggctagctacaacgatggtagcc

SEQ ID NO: 19831 - DNA, 31 bp, Artificial Sequence
  Description of Artificial Sequence:  Enzymatic Nucleic Acid
gagtgataggctagctacaacgaccggactg

SEQ ID NO: 19832 - DNA, 31 bp, Artificial Sequence
  Description of Artificial Sequence:  Enzymatic Nucleic Acid
cggagtgaggctagctacaacgaatccggac

SEQ ID NO: 19833 - DNA, 31 bp, Artificial Sequence
  Description of Artificial Sequence:  Enzymatic Nucleic Acid
catcggagggctagctacaacgagatatccg

SEQ ID NO: 19834 - DNA, 31 bp, Artificial Sequence
  Description of Artificial Sequence:  Enzymatic Nucleic Acid
ctgtgtcaggctagctacaacgacggagtga

SEQ ID NO: 19835 - DNA, 31 bp, Artificial Sequence
  Description of Artificial Sequence:  Enzymatic Nucleic Acid
tgtctgtgggctagctacaacgacatcggag

SEQ ID NO: 19836 - DNA, 31 bp, Artificial Sequence
  Description of Artificial Sequence:  Enzymatic Nucleic Acid
ggtgtctgggctagctacaacgagtcatcgg

SEQ ID NO: 19837 - DNA, 31 bp, Artificial Sequence
  Description of Artificial Sequence:  Enzymatic Nucleic Acid
cggtggtgggctagctacaacgactgtgtca

SEQ ID NO: 19838 - DNA, 31 bp, Artificial Sequence
  Description of Artificial Sequence:  Enzymatic Nucleic Acid
cacggtggggctagctacaacgagtctgtgt

SEQ ID NO: 19839 - DNA, 31 bp, Artificial Sequence
  Description of Artificial Sequence:  Enzymatic Nucleic Acid
gtacacggggctagctacaacgaggtgtctg

SEQ ID NO: 19840 - DNA, 31 bp, Artificial Sequence
  Description of Artificial Sequence:  Enzymatic Nucleic Acid
ggagtacaggctagctacaacgaggtggtgt

SEQ ID NO: 19841 - DNA, 31 bp, Artificial Sequence
  Description of Artificial Sequence:  Enzymatic Nucleic Acid
ctggagtaggctagctacaacgaacggtggt

SEQ ID NO: 19842 - DNA, 31 bp, Artificial Sequence
  Description of Artificial Sequence:  Enzymatic Nucleic Acid
cactggagggctagctacaacgaacacggtg

SEQ ID NO: 19843 - DNA, 31 bp, Artificial Sequence
  Description of Artificial Sequence:  Enzymatic Nucleic Acid
cttcctcaggctagctacaacgatggagtac

SEQ ID NO: 19844 - DNA, 31 bp, Artificial Sequence
  Description of Artificial Sequence:  Enzymatic Nucleic Acid
aagttctgggctagctacaacgattcctcac

SEQ ID NO: 19845 - DNA, 31 bp, Artificial Sequence
  Description of Artificial Sequence:  Enzymatic Nucleic Acid
tttaaaagggctagctacaacgatctgcttc

SEQ ID NO: 19846 - DNA, 31 bp, Artificial Sequence
  Description of Artificial Sequence:  Enzymatic Nucleic Acid
tctatcagggctagctacaacgatttaaaag

SEQ ID NO: 19847 - DNA, 31 bp, Artificial Sequence
  Description of Artificial Sequence:  Enzymatic Nucleic Acid
aatctctaggctagctacaacgacagcttta

SEQ ID NO: 19848 - DNA, 31 bp, Artificial Sequence
  Description of Artificial Sequence:  Enzymatic Nucleic Acid
cactccaaggctagctacaacgactctatca

SEQ ID NO: 19849 - DNA, 31 bp, Artificial Sequence
  Description of Artificial Sequence:  Enzymatic Nucleic Acid
ggtttgcaggctagctacaacgatccaatct

SEQ ID NO: 19850 - DNA, 31 bp, Artificial Sequence
  Description of Artificial Sequence:  Enzymatic Nucleic Acid
ccggtttgggctagctacaacgaactccaat

SEQ ID NO: 19851 - DNA, 31 bp, Artificial Sequence
  Description of Artificial Sequence:  Enzymatic Nucleic Acid
gctaccggggctagctacaacgattgcactc

SEQ ID NO: 19852 - DNA, 31 bp, Artificial Sequence
  Description of Artificial Sequence:  Enzymatic Nucleic Acid
ctgtgctaggctagctacaacgacggtttgc

SEQ ID NO: 19853 - DNA, 31 bp, Artificial Sequence
  Description of Artificial Sequence:  Enzymatic Nucleic Acid
gggctgtgggctagctacaacgataccggtt

SEQ ID NO: 19854 - DNA, 31 bp, Artificial Sequence
  Description of Artificial Sequence:  Enzymatic Nucleic Acid
ctgggctgggctagctacaacgagctaccgg

SEQ ID NO: 19855 - DNA, 31 bp, Artificial Sequence
  Description of Artificial Sequence:  Enzymatic Nucleic Acid
aatctgggggctagctacaacgatgtgctac

SEQ ID NO: 19856 - DNA, 31 bp, Artificial Sequence
  Description of Artificial Sequence:  Enzymatic Nucleic Acid
ctggagaaggctagctacaacgactgggctg

SEQ ID NO: 19857 - DNA, 31 bp, Artificial Sequence
  Description of Artificial Sequence:  Enzymatic Nucleic Acid
gagtcaggggctagctacaacgatggagaat

SEQ ID NO: 19858 - DNA, 31 bp, Artificial Sequence
  Description of Artificial Sequence:  Enzymatic Nucleic Acid
tccccgagggctagctacaacgacaggctgg

SEQ ID NO: 19859 - DNA, 31 bp, Artificial Sequence
  Description of Artificial Sequence:  Enzymatic Nucleic Acid
cagtgtggggctagctacaacgaccccgagt

SEQ ID NO: 19860 - DNA, 31 bp, Artificial Sequence
  Description of Artificial Sequence:  Enzymatic Nucleic Acid
gctcagtgggctagctacaacgaggtccccg

SEQ ID NO: 19861 - DNA, 31 bp, Artificial Sequence
  Description of Artificial Sequence:  Enzymatic Nucleic Acid
gagctcagggctagctacaacgagtggtccc

SEQ ID NO: 19862 - DNA, 31 bp, Artificial Sequence
  Description of Artificial Sequence:  Enzymatic Nucleic Acid
gaggagagggctagctacaacgatcagtgtg

SEQ ID NO: 19863 - DNA, 31 bp, Artificial Sequence
  Description of Artificial Sequence:  Enzymatic Nucleic Acid
cttttaaaggctagctacaacgaaggaggag

SEQ ID NO: 19864 - DNA, 31 bp, Artificial Sequence
  Description of Artificial Sequence:  Enzymatic Nucleic Acid
tgtggatgggctagctacaacgattcctttt

SEQ ID NO: 19865 - DNA, 31 bp, Artificial Sequence
  Description of Artificial Sequence:  Enzymatic Nucleic Acid
ggtgtggaggctagctacaacgagcttcctt

SEQ ID NO: 19866 - DNA, 31 bp, Artificial Sequence
  Description of Artificial Sequence:  Enzymatic Nucleic Acid
ttggggtgggctagctacaacgaggatgctt

SEQ ID NO: 19867 - DNA, 31 bp, Artificial Sequence
  Description of Artificial Sequence:  Enzymatic Nucleic Acid
agttggggggctagctacaacgagtggatgc

SEQ ID NO: 19868 - DNA, 31 bp, Artificial Sequence
  Description of Artificial Sequence:  Enzymatic Nucleic Acid
tccgggagggctagctacaacgatggggtgt

SEQ ID NO: 19869 - DNA, 31 bp, Artificial Sequence
  Description of Artificial Sequence:  Enzymatic Nucleic Acid
atgtgatgggctagctacaacgaccgggagt

SEQ ID NO: 19870 - DNA, 31 bp, Artificial Sequence
  Description of Artificial Sequence:  Enzymatic Nucleic Acid
tcatgtgaggctagctacaacgagtccggga

SEQ ID NO: 19871 - DNA, 31 bp, Artificial Sequence
  Description of Artificial Sequence:  Enzymatic Nucleic Acid
ctctcatgggctagctacaacgagatgtccg

SEQ ID NO: 19872 - DNA, 31 bp, Artificial Sequence
  Description of Artificial Sequence:  Enzymatic Nucleic Acid
acctctcaggctagctacaacgagtgatgtc

SEQ ID NO: 19873 - DNA, 31 bp, Artificial Sequence
  Description of Artificial Sequence:  Enzymatic Nucleic Acid
tgagcagaggctagctacaacgactctcatg

SEQ ID NO: 19874 - DNA, 31 bp, Artificial Sequence
  Description of Artificial Sequence:  Enzymatic Nucleic Acid
aatctgagggctagctacaacgaagacctct

SEQ ID NO: 19875 - DNA, 31 bp, Artificial Sequence
  Description of Artificial Sequence:  Enzymatic Nucleic Acid
cttcaaaaggctagctacaacgactgagcag

SEQ ID NO: 19876 - DNA, 31 bp, Artificial Sequence
  Description of Artificial Sequence:  Enzymatic Nucleic Acid
gaacaacaggctagctacaacgattcaaaat

SEQ ID NO: 19877 - DNA, 31 bp, Artificial Sequence
  Description of Artificial Sequence:  Enzymatic Nucleic Acid
aagaacaaggctagctacaacgaacttcaaa

SEQ ID NO: 19878 - DNA, 31 bp, Artificial Sequence
  Description of Artificial Sequence:  Enzymatic Nucleic Acid
ggaaagaaggctagctacaacgaaacacttc

SEQ ID NO: 19879 - DNA, 31 bp, Artificial Sequence
  Description of Artificial Sequence:  Enzymatic Nucleic Acid
cctgctggggctagctacaacgaggaaagaa

SEQ ID NO: 19880 - DNA, 31 bp, Artificial Sequence
  Description of Artificial Sequence:  Enzymatic Nucleic Acid
acttcctgggctagctacaacgatggtggaa

SEQ ID NO: 19881 - DNA, 31 bp, Artificial Sequence
  Description of Artificial Sequence:  Enzymatic Nucleic Acid
tgcggctaggctagctacaacgattcctgct

SEQ ID NO: 19882 - DNA, 31 bp, Artificial Sequence
  Description of Artificial Sequence:  Enzymatic Nucleic Acid
aaatgcggggctagctacaacgatacttcct

SEQ ID NO: 19883 - DNA, 31 bp, Artificial Sequence
  Description of Artificial Sequence:  Enzymatic Nucleic Acid
atcaaatgggctagctacaacgaggctactt

SEQ ID NO: 19884 - DNA, 31 bp, Artificial Sequence
  Description of Artificial Sequence:  Enzymatic Nucleic Acid
aaatcaaaggctagctacaacgagcggctac

SEQ ID NO: 19885 - DNA, 31 bp, Artificial Sequence
  Description of Artificial Sequence:  Enzymatic Nucleic Acid
aatgaaaaggctagctacaacgacaaatgcg

SEQ ID NO: 19886 - DNA, 31 bp, Artificial Sequence
  Description of Artificial Sequence:  Enzymatic Nucleic Acid
tgtcgaaaggctagctacaacgagaaaatca

SEQ ID NO: 19887 - DNA, 31 bp, Artificial Sequence
  Description of Artificial Sequence:  Enzymatic Nucleic Acid
ttctgttgggctagctacaacgacgaaatga

SEQ ID NO: 19888 - DNA, 31 bp, Artificial Sequence
  Description of Artificial Sequence:  Enzymatic Nucleic Acid
tttttctgggctagctacaacgatgtcgaaa

SEQ ID NO: 19889 - DNA, 31 bp, Artificial Sequence
  Description of Artificial Sequence:  Enzymatic Nucleic Acid
gtccgaggggctagctacaacgacctttttc

SEQ ID NO: 19890 - DNA, 31 bp, Artificial Sequence
  Description of Artificial Sequence:  Enzymatic Nucleic Acid
ccctgcagggctagctacaacgaccgaggtc

SEQ ID NO: 19891 - DNA, 31 bp, Artificial Sequence
  Description of Artificial Sequence:  Enzymatic Nucleic Acid
gctccctgggctagctacaacgaagtccgag

SEQ ID NO: 19892 - DNA, 31 bp, Artificial Sequence
  Description of Artificial Sequence:  Enzymatic Nucleic Acid
aagactggggctagctacaacgatccctgca

SEQ ID NO: 19893 - DNA, 31 bp, Artificial Sequence
  Description of Artificial Sequence:  Enzymatic Nucleic Acid
ctagaagaggctagctacaacgatggctccc

SEQ ID NO: 19894 - DNA, 31 bp, Artificial Sequence
  Description of Artificial Sequence:  Enzymatic Nucleic Acid
aggatatgggctagctacaacgactagaaga

SEQ ID NO: 19895 - DNA, 31 bp, Artificial Sequence
  Description of Artificial Sequence:  Enzymatic Nucleic Acid
ccaggataggctagctacaacgagcctagaa

SEQ ID NO: 19896 - DNA, 31 bp, Artificial Sequence
  Description of Artificial Sequence:  Enzymatic Nucleic Acid
ttccaggaggctagctacaacgaatgcctag

SEQ ID NO: 19897 - DNA, 31 bp, Artificial Sequence
  Description of Artificial Sequence:  Enzymatic Nucleic Acid
gtcacaagggctagctacaacgactcttcca

SEQ ID NO: 19898 - DNA, 31 bp, Artificial Sequence
  Description of Artificial Sequence:  Enzymatic Nucleic Acid
ttgggtcaggctagctacaacgaaagcctct

SEQ ID NO: 19899 - DNA, 31 bp, Artificial Sequence
  Description of Artificial Sequence:  Enzymatic Nucleic Acid
ttcttgggggctagctacaacgacacaagcc

SEQ ID NO: 19900 - DNA, 31 bp, Artificial Sequence
  Description of Artificial Sequence:  Enzymatic Nucleic Acid
cagacacaggctagctacaacgatcttgggt

SEQ ID NO: 19901 - DNA, 31 bp, Artificial Sequence
  Description of Artificial Sequence:  Enzymatic Nucleic Acid
cacagacaggctagctacaacgaattcttgg

SEQ ID NO: 19902 - DNA, 31 bp, Artificial Sequence
  Description of Artificial Sequence:  Enzymatic Nucleic Acid
gacacagaggctagctacaacgaacattctt

SEQ ID NO: 19903 - DNA, 31 bp, Artificial Sequence
  Description of Artificial Sequence:  Enzymatic Nucleic Acid
agaagacaggctagctacaacgaagacacat

SEQ ID NO: 19904 - DNA, 31 bp, Artificial Sequence
  Description of Artificial Sequence:  Enzymatic Nucleic Acid
ggagaagaggctagctacaacgaacagacac

SEQ ID NO: 19905 - DNA, 31 bp, Artificial Sequence
  Description of Artificial Sequence:  Enzymatic Nucleic Acid
ggtcaacaggctagctacaacgatgggagaa

SEQ ID NO: 19906 - DNA, 31 bp, Artificial Sequence
  Description of Artificial Sequence:  Enzymatic Nucleic Acid
caggtcaaggctagctacaacgaactgggag

SEQ ID NO: 19907 - DNA, 31 bp, Artificial Sequence
  Description of Artificial Sequence:  Enzymatic Nucleic Acid
ggatcaggggctagctacaacgacaacactg

SEQ ID NO: 19908 - DNA, 31 bp, Artificial Sequence
  Description of Artificial Sequence:  Enzymatic Nucleic Acid
aaagaggaggctagctacaacgacaggtcaa

SEQ ID NO: 19909 - DNA, 31 bp, Artificial Sequence
  Description of Artificial Sequence:  Enzymatic Nucleic Acid
taaatgaaggctagctacaacgagaaaaaag

SEQ ID NO: 19910 - DNA, 31 bp, Artificial Sequence
  Description of Artificial Sequence:  Enzymatic Nucleic Acid
tttttaaaggctagctacaacgagaatgaaa

SEQ ID NO: 19911 - DNA, 31 bp, Artificial Sequence
  Description of Artificial Sequence:  Enzymatic Nucleic Acid
tgataatgggctagctacaacgatttttaaa

SEQ ID NO: 19912 - DNA, 31 bp, Artificial Sequence
  Description of Artificial Sequence:  Enzymatic Nucleic Acid
catgataaggctagctacaacgagcttttta

SEQ ID NO: 19913 - DNA, 31 bp, Artificial Sequence
  Description of Artificial Sequence:  Enzymatic Nucleic Acid
gggcatgaggctagctacaacgaaatgcttt

SEQ ID NO: 19914 - DNA, 31 bp, Artificial Sequence
  Description of Artificial Sequence:  Enzymatic Nucleic Acid
caggggcaggctagctacaacgagataatgc

SEQ ID NO: 19915 - DNA, 31 bp, Artificial Sequence
  Description of Artificial Sequence:  Enzymatic Nucleic Acid
agcaggggggctagctacaacgaatgataat

SEQ ID NO: 19916 - DNA, 31 bp, Artificial Sequence
  Description of Artificial Sequence:  Enzymatic Nucleic Acid
acccgcagggctagctacaacgaaggggcat

SEQ ID NO: 19917 - DNA, 31 bp, Artificial Sequence
  Description of Artificial Sequence:  Enzymatic Nucleic Acid
gagacccgggctagctacaacgaagcagggg

SEQ ID NO: 19918 - DNA, 31 bp, Artificial Sequence
  Description of Artificial Sequence:  Enzymatic Nucleic Acid
tggtgagaggctagctacaacgaccgcagca

SEQ ID NO: 19919 - DNA, 31 bp, Artificial Sequence
  Description of Artificial Sequence:  Enzymatic Nucleic Acid
acccatggggctagctacaacgagagacccg

SEQ ID NO: 19920 - DNA, 31 bp, Artificial Sequence
  Description of Artificial Sequence:  Enzymatic Nucleic Acid
taaacccaggctagctacaacgaggtgagac

SEQ ID NO: 19921 - DNA, 31 bp, Artificial Sequence
  Description of Artificial Sequence:  Enzymatic Nucleic Acid
gttctaaaggctagctacaacgaccatggtg

SEQ ID NO: 19922 - DNA, 31 bp, Artificial Sequence
  Description of Artificial Sequence:  Enzymatic Nucleic Acid
gctctttgggctagctacaacgatctaaacc

SEQ ID NO: 19923 - DNA, 31 bp, Artificial Sequence
  Description of Artificial Sequence:  Enzymatic Nucleic Acid
gcttgaagggctagctacaacgatctttgtt

SEQ ID NO: 19924 - DNA, 31 bp, Artificial Sequence
  Description of Artificial Sequence:  Enzymatic Nucleic Acid
ggccattgggctagctacaacgattgaagct

SEQ ID NO: 19925 - DNA, 31 bp, Artificial Sequence
  Description of Artificial Sequence:  Enzymatic Nucleic Acid
tggggccaggctagctacaacgatgcttgaa

SEQ ID NO: 19926 - DNA, 31 bp, Artificial Sequence
  Description of Artificial Sequence:  Enzymatic Nucleic Acid
ggatggggggctagctacaacgacattgctt

SEQ ID NO: 19927 - DNA, 31 bp, Artificial Sequence
  Description of Artificial Sequence:  Enzymatic Nucleic Acid
tttgaggaggctagctacaacgaggggccat

SEQ ID NO: 19928 - DNA, 31 bp, Artificial Sequence
  Description of Artificial Sequence:  Enzymatic Nucleic Acid
tactgctaggctagctacaacgattctttga

SEQ ID NO: 19929 - DNA, 31 bp, Artificial Sequence
  Description of Artificial Sequence:  Enzymatic Nucleic Acid
aggtactgggctagctacaacgatacttctt

SEQ ID NO: 19930 - DNA, 31 bp, Artificial Sequence
  Description of Artificial Sequence:  Enzymatic Nucleic Acid
cccaggtaggctagctacaacgatgctactt

SEQ ID NO: 19931 - DNA, 31 bp, Artificial Sequence
  Description of Artificial Sequence:  Enzymatic Nucleic Acid
tccccaggggctagctacaacgaactgctac

SEQ ID NO: 19932 - DNA, 31 bp, Artificial Sequence
  Description of Artificial Sequence:  Enzymatic Nucleic Acid
agtgtcagggctagctacaacgatccccagg

SEQ ID NO: 19933 - DNA, 31 bp, Artificial Sequence
  Description of Artificial Sequence:  Enzymatic Nucleic Acid
cagaagtgggctagctacaacgacagctccc

SEQ ID NO: 19934 - DNA, 31 bp, Artificial Sequence
  Description of Artificial Sequence:  Enzymatic Nucleic Acid
tacagaagggctagctacaacgagtcagctc

SEQ ID NO: 19935 - DNA, 31 bp, Artificial Sequence
  Description of Artificial Sequence:  Enzymatic Nucleic Acid
tagttttaggctagctacaacgaagaagtgt

SEQ ID NO: 19936 - DNA, 31 bp, Artificial Sequence
  Description of Artificial Sequence:  Enzymatic Nucleic Acid
tcttctagggctagctacaacgatttacaga

SEQ ID NO: 19937 - DNA, 31 bp, Artificial Sequence
  Description of Artificial Sequence:  Enzymatic Nucleic Acid
ctggtttaggctagctacaacgacttctagt

SEQ ID NO: 19938 - DNA, 31 bp, Artificial Sequence
  Description of Artificial Sequence:  Enzymatic Nucleic Acid
ttgcctggggctagctacaacgattatcttc

SEQ ID NO: 19939 - DNA, 31 bp, Artificial Sequence
  Description of Artificial Sequence:  Enzymatic Nucleic Acid
ttacgttgggctagctacaacgactggttta

SEQ ID NO: 19940 - DNA, 31 bp, Artificial Sequence
  Description of Artificial Sequence:  Enzymatic Nucleic Acid
cacttacgggctagctacaacgatgcctggt

SEQ ID NO: 19941 - DNA, 31 bp, Artificial Sequence
  Description of Artificial Sequence:  Enzymatic Nucleic Acid
aacacttaggctagctacaacgagttgcctg

SEQ ID NO: 19942 - DNA, 31 bp, Artificial Sequence
  Description of Artificial Sequence:  Enzymatic Nucleic Acid
ctcgaacaggctagctacaacgattacgttg

SEQ ID NO: 19943 - DNA, 31 bp, Artificial Sequence
  Description of Artificial Sequence:  Enzymatic Nucleic Acid
acctcgaaggctagctacaacgaacttacgt

SEQ ID NO: 19944 - DNA, 31 bp, Artificial Sequence
  Description of Artificial Sequence:  Enzymatic Nucleic Acid
cttcaacaggctagctacaacgactcgaaca

SEQ ID NO: 19945 - DNA, 31 bp, Artificial Sequence
  Description of Artificial Sequence:  Enzymatic Nucleic Acid
atcttcaaggctagctacaacgaacctcgaa

SEQ ID NO: 19946 - DNA, 31 bp, Artificial Sequence
  Description of Artificial Sequence:  Enzymatic Nucleic Acid
ccttcccaggctagctacaacgacttcaaca

SEQ ID NO: 19947 - DNA, 31 bp, Artificial Sequence
  Description of Artificial Sequence:  Enzymatic Nucleic Acid
cctgcaaaggctagctacaacgaccttccca

SEQ ID NO: 19948 - DNA, 31 bp, Artificial Sequence
  Description of Artificial Sequence:  Enzymatic Nucleic Acid
cagccctgggctagctacaacgaaaatcctt

SEQ ID NO: 19949 - DNA, 31 bp, Artificial Sequence
  Description of Artificial Sequence:  Enzymatic Nucleic Acid
agactcagggctagctacaacgacctgcaaa

SEQ ID NO: 19950 - DNA, 31 bp, Artificial Sequence
  Description of Artificial Sequence:  Enzymatic Nucleic Acid
tggatagaggctagctacaacgatcagccct

SEQ ID NO: 19951 - DNA, 31 bp, Artificial Sequence
  Description of Artificial Sequence:  Enzymatic Nucleic Acid
ctcttggaggctagctacaacgaagactcag

SEQ ID NO: 19952 - DNA, 31 bp, Artificial Sequence
  Description of Artificial Sequence:  Enzymatic Nucleic Acid
aaacaaagggctagctacaacgactcttgga

SEQ ID NO: 19953 - DNA, 31 bp, Artificial Sequence
  Description of Artificial Sequence:  Enzymatic Nucleic Acid
gtcctaaaggctagctacaacgaaaagcctc

SEQ ID NO: 19954 - DNA, 31 bp, Artificial Sequence
  Description of Artificial Sequence:  Enzymatic Nucleic Acid
gacccacgggctagctacaacgacctaaaca

SEQ ID NO: 19955 - DNA, 31 bp, Artificial Sequence
  Description of Artificial Sequence:  Enzymatic Nucleic Acid
gggacccaggctagctacaacgagtcctaaa

SEQ ID NO: 19956 - DNA, 31 bp, Artificial Sequence
  Description of Artificial Sequence:  Enzymatic Nucleic Acid
gcttgggaggctagctacaacgaccacgtcc

SEQ ID NO: 19957 - DNA, 31 bp, Artificial Sequence
  Description of Artificial Sequence:  Enzymatic Nucleic Acid
aggcttggggctagctacaacgattgggacc

SEQ ID NO: 19958 - DNA, 31 bp, Artificial Sequence
  Description of Artificial Sequence:  Enzymatic Nucleic Acid
acttaaggggctagctacaacgattggcttg

SEQ ID NO: 19959 - DNA, 31 bp, Artificial Sequence
  Description of Artificial Sequence:  Enzymatic Nucleic Acid
attccacaggctagctacaacgattaaggct

SEQ ID NO: 19960 - DNA, 31 bp, Artificial Sequence
  Description of Artificial Sequence:  Enzymatic Nucleic Acid
gaattccaggctagctacaacgaacttaagg

SEQ ID NO: 19961 - DNA, 31 bp, Artificial Sequence
  Description of Artificial Sequence:  Enzymatic Nucleic Acid
aatccgaaggctagctacaacgatccacact

SEQ ID NO: 19962 - DNA, 31 bp, Artificial Sequence
  Description of Artificial Sequence:  Enzymatic Nucleic Acid
tctatcaaggctagctacaacgaccgaattc

SEQ ID NO: 19963 - DNA, 31 bp, Artificial Sequence
  Description of Artificial Sequence:  Enzymatic Nucleic Acid
cctttctaggctagctacaacgacaatccga

SEQ ID NO: 19964 - DNA, 31 bp, Artificial Sequence
  Description of Artificial Sequence:  Enzymatic Nucleic Acid
aacgttagggctagctacaacgacttccttt

SEQ ID NO: 19965 - DNA, 31 bp, Artificial Sequence
  Description of Artificial Sequence:  Enzymatic Nucleic Acid
aggtaacgggctagctacaacgatagtcttc

SEQ ID NO: 19966 - DNA, 31 bp, Artificial Sequence
  Description of Artificial Sequence:  Enzymatic Nucleic Acid
caaggtaaggctagctacaacgagttagtct

SEQ ID NO: 19967 - DNA, 31 bp, Artificial Sequence
  Description of Artificial Sequence:  Enzymatic Nucleic Acid
aagcaaggggctagctacaacgaaacgttag

SEQ ID NO: 19968 - DNA, 31 bp, Artificial Sequence
  Description of Artificial Sequence:  Enzymatic Nucleic Acid
ctccaaagggctagctacaacgaaaggtaac

SEQ ID NO: 19969 - DNA, 31 bp, Artificial Sequence
  Description of Artificial Sequence:  Enzymatic Nucleic Acid
ctccagtaggctagctacaacgatctccaaa

SEQ ID NO: 19970 - DNA, 31 bp, Artificial Sequence
  Description of Artificial Sequence:  Enzymatic Nucleic Acid
ggctccagggctagctacaacgaactctcca

SEQ ID NO: 19971 - DNA, 31 bp, Artificial Sequence
  Description of Artificial Sequence:  Enzymatic Nucleic Acid
tttgcaggggctagctacaacgatccagtac

SEQ ID NO: 19972 - DNA, 31 bp, Artificial Sequence
  Description of Artificial Sequence:  Enzymatic Nucleic Acid
tgcatttgggctagctacaacgaaggctcca

SEQ ID NO: 19973 - DNA, 31 bp, Artificial Sequence
  Description of Artificial Sequence:  Enzymatic Nucleic Acid
acaatgcaggctagctacaacgattgcaggc

SEQ ID NO: 19974 - DNA, 31 bp, Artificial Sequence
  Description of Artificial Sequence:  Enzymatic Nucleic Acid
acacaatgggctagctacaacgaatttgcag

SEQ ID NO: 19975 - DNA, 31 bp, Artificial Sequence
  Description of Artificial Sequence:  Enzymatic Nucleic Acid
aaacacaaggctagctacaacgagcatttgc

SEQ ID NO: 19976 - DNA, 31 bp, Artificial Sequence
  Description of Artificial Sequence:  Enzymatic Nucleic Acid
agcaaacaggctagctacaacgaaatgcatt

SEQ ID NO: 19977 - DNA, 31 bp, Artificial Sequence
  Description of Artificial Sequence:  Enzymatic Nucleic Acid
agagcaaaggctagctacaacgaacaatgca

SEQ ID NO: 19978 - DNA, 31 bp, Artificial Sequence
  Description of Artificial Sequence:  Enzymatic Nucleic Acid
caccagagggctagctacaacgaaaacacaa

SEQ ID NO: 19979 - DNA, 31 bp, Artificial Sequence
  Description of Artificial Sequence:  Enzymatic Nucleic Acid
cacctccaggctagctacaacgacagagcaa

SEQ ID NO: 19980 - DNA, 31 bp, Artificial Sequence
  Description of Artificial Sequence:  Enzymatic Nucleic Acid
catgcccaggctagctacaacgactccacca

SEQ ID NO: 19981 - DNA, 31 bp, Artificial Sequence
  Description of Artificial Sequence:  Enzymatic Nucleic Acid
accccatgggctagctacaacgaccacctcc

SEQ ID NO: 19982 - DNA, 31 bp, Artificial Sequence
  Description of Artificial Sequence:  Enzymatic Nucleic Acid
agaccccaggctagctacaacgagcccacct

SEQ ID NO: 19983 - DNA, 31 bp, Artificial Sequence
  Description of Artificial Sequence:  Enzymatic Nucleic Acid
agaacagaggctagctacaacgacccatgcc

SEQ ID NO: 19984 - DNA, 31 bp, Artificial Sequence
  Description of Artificial Sequence:  Enzymatic Nucleic Acid
tttcagaaggctagctacaacgaagacccca

SEQ ID NO: 19985 - DNA, 31 bp, Artificial Sequence
  Description of Artificial Sequence:  Enzymatic Nucleic Acid
cctttacaggctagctacaacgattcagaac

SEQ ID NO: 19986 - DNA, 31 bp, Artificial Sequence
  Description of Artificial Sequence:  Enzymatic Nucleic Acid
accctttaggctagctacaacgaatttcaga

SEQ ID NO: 19987 - DNA, 31 bp, Artificial Sequence
  Description of Artificial Sequence:  Enzymatic Nucleic Acid
cgtctgaaggctagctacaacgacctttaca

SEQ ID NO: 19988 - DNA, 31 bp, Artificial Sequence
  Description of Artificial Sequence:  Enzymatic Nucleic Acid
aaaccccgggctagctacaacgactgaaccc

SEQ ID NO: 19989 - DNA, 31 bp, Artificial Sequence
  Description of Artificial Sequence:  Enzymatic Nucleic Acid
accagaaaggctagctacaacgacccgtctg

SEQ ID NO: 19990 - DNA, 31 bp, Artificial Sequence
  Description of Artificial Sequence:  Enzymatic Nucleic Acid
ttctaaaaggctagctacaacgacagaaacc

SEQ ID NO: 19991 - DNA, 31 bp, Artificial Sequence
  Description of Artificial Sequence:  Enzymatic Nucleic Acid
acacgcaaggctagctacaacgacttctaaa

SEQ ID NO: 19992 - DNA, 31 bp, Artificial Sequence
  Description of Artificial Sequence:  Enzymatic Nucleic Acid
agaacacgggctagctacaacgaaaccttct

SEQ ID NO: 19993 - DNA, 31 bp, Artificial Sequence
  Description of Artificial Sequence:  Enzymatic Nucleic Acid
gaagaacaggctagctacaacgagcaacctt

SEQ ID NO: 19994 - DNA, 31 bp, Artificial Sequence
  Description of Artificial Sequence:  Enzymatic Nucleic Acid
tcgaagaaggctagctacaacgaacgcaacc

SEQ ID NO: 19995 - DNA, 31 bp, Artificial Sequence
  Description of Artificial Sequence:  Enzymatic Nucleic Acid
tagcccaaggctagctacaacgatcgaagaa

SEQ ID NO: 19996 - DNA, 31 bp, Artificial Sequence
  Description of Artificial Sequence:  Enzymatic Nucleic Acid
tactttagggctagctacaacgaccaactcg

SEQ ID NO: 19997 - DNA, 31 bp, Artificial Sequence
  Description of Artificial Sequence:  Enzymatic Nucleic Acid
gaactctaggctagctacaacgatttagccc

SEQ ID NO: 19998 - DNA, 31 bp, Artificial Sequence
  Description of Artificial Sequence:  Enzymatic Nucleic Acid
acaacgaaggctagctacaacgatctacttt

SEQ ID NO: 19999 - DNA, 31 bp, Artificial Sequence
  Description of Artificial Sequence:  Enzymatic Nucleic Acid
cagcacaaggctagctacaacgagaactcta

SEQ ID NO: 20000 - DNA, 31 bp, Artificial Sequence
  Description of Artificial Sequence:  Enzymatic Nucleic Acid
aaacagcaggctagctacaacgaaacgaact

SEQ ID NO: 20001 - DNA, 31 bp, Artificial Sequence
  Description of Artificial Sequence:  Enzymatic Nucleic Acid
agaaacagggctagctacaacgaacaacgaa

SEQ ID NO: 20002 - DNA, 31 bp, Artificial Sequence
  Description of Artificial Sequence:  Enzymatic Nucleic Acid
gtcagaaaggctagctacaacgaagcacaac

SEQ ID NO: 20003 - DNA, 31 bp, Artificial Sequence
  Description of Artificial Sequence:  Enzymatic Nucleic Acid
attaggagggctagctacaacgacagaaaca

SEQ ID NO: 20004 - DNA, 31 bp, Artificial Sequence
  Description of Artificial Sequence:  Enzymatic Nucleic Acid
aactctcaggctagctacaacgataggagtc

SEQ ID NO: 20005 - DNA, 31 bp, Artificial Sequence
  Description of Artificial Sequence:  Enzymatic Nucleic Acid
ggaaggaaggctagctacaacgatctcatta

SEQ ID NO: 20006 - DNA, 31 bp, Artificial Sequence
  Description of Artificial Sequence:  Enzymatic Nucleic Acid
gctaacggggctagctacaacgactggaagg

SEQ ID NO: 20007 - DNA, 31 bp, Artificial Sequence
  Description of Artificial Sequence:  Enzymatic Nucleic Acid
acagctaaggctagctacaacgaggtctgga

SEQ ID NO: 20008 - DNA, 31 bp, Artificial Sequence
  Description of Artificial Sequence:  Enzymatic Nucleic Acid
ggagacagggctagctacaacgataacggtc

SEQ ID NO: 20009 - DNA, 31 bp, Artificial Sequence
  Description of Artificial Sequence:  Enzymatic Nucleic Acid
caaggagaggctagctacaacgaagctaacg

SEQ ID NO: 20010 - DNA, 31 bp, Artificial Sequence
  Description of Artificial Sequence:  Enzymatic Nucleic Acid
gggcttggggctagctacaacgaaaggagac

SEQ ID NO: 20011 - DNA, 31 bp, Artificial Sequence
  Description of Artificial Sequence:  Enzymatic Nucleic Acid
tcctggggggctagctacaacgattggcaag

SEQ ID NO: 20012 - DNA, 31 bp, Artificial Sequence
  Description of Artificial Sequence:  Enzymatic Nucleic Acid
ctgcatcaggctagctacaacgatttcttcc

SEQ ID NO: 20013 - DNA, 31 bp, Artificial Sequence
  Description of Artificial Sequence:  Enzymatic Nucleic Acid
gagctgcaggctagctacaacgacattttct

SEQ ID NO: 20014 - DNA, 31 bp, Artificial Sequence
  Description of Artificial Sequence:  Enzymatic Nucleic Acid
cagagctgggctagctacaacgaatcatttt

SEQ ID NO: 20015 - DNA, 31 bp, Artificial Sequence
  Description of Artificial Sequence:  Enzymatic Nucleic Acid
agccagagggctagctacaacgatgcatcat

SEQ ID NO: 20016 - DNA, 31 bp, Artificial Sequence
  Description of Artificial Sequence:  Enzymatic Nucleic Acid
acaaggagggctagctacaacgacagagctg

SEQ ID NO: 20017 - DNA, 31 bp, Artificial Sequence
  Description of Artificial Sequence:  Enzymatic Nucleic Acid
ctgggagaggctagctacaacgaaaggagcc

SEQ ID NO: 20018 - DNA, 31 bp, Artificial Sequence
  Description of Artificial Sequence:  Enzymatic Nucleic Acid
aggatcagggctagctacaacgactgggaga

SEQ ID NO: 20019 - DNA, 31 bp, Artificial Sequence
  Description of Artificial Sequence:  Enzymatic Nucleic Acid
ataaaggaggctagctacaacgacagcctgg

SEQ ID NO: 20020 - DNA, 31 bp, Artificial Sequence
  Description of Artificial Sequence:  Enzymatic Nucleic Acid
attctgaaggctagctacaacgaaaaggatc

SEQ ID NO: 20021 - DNA, 31 bp, Artificial Sequence
  Description of Artificial Sequence:  Enzymatic Nucleic Acid
ttgtggtaggctagctacaacgatctgaata

SEQ ID NO: 20022 - DNA, 31 bp, Artificial Sequence
  Description of Artificial Sequence:  Enzymatic Nucleic Acid
ctttgtggggctagctacaacgaattctgaa

SEQ ID NO: 20023 - DNA, 31 bp, Artificial Sequence
  Description of Artificial Sequence:  Enzymatic Nucleic Acid
tttctttgggctagctacaacgaggtattct

SEQ ID NO: 20024 - DNA, 31 bp, Artificial Sequence
  Description of Artificial Sequence:  Enzymatic Nucleic Acid
gctgaatgggctagctacaacgacctttctt

SEQ ID NO: 20025 - DNA, 31 bp, Artificial Sequence
  Description of Artificial Sequence:  Enzymatic Nucleic Acid
gagctgaaggctagctacaacgagtcctttc

SEQ ID NO: 20026 - DNA, 31 bp, Artificial Sequence
  Description of Artificial Sequence:  Enzymatic Nucleic Acid
gccttgagggctagctacaacgatgaatgtc

SEQ ID NO: 20027 - DNA, 31 bp, Artificial Sequence
  Description of Artificial Sequence:  Enzymatic Nucleic Acid
gcagggagggctagctacaacgacttgagct

SEQ ID NO: 20028 - DNA, 31 bp, Artificial Sequence
  Description of Artificial Sequence:  Enzymatic Nucleic Acid
caacacggggctagctacaacgaagggagcc

SEQ ID NO: 20029 - DNA, 31 bp, Artificial Sequence
  Description of Artificial Sequence:  Enzymatic Nucleic Acid
cttcaacaggctagctacaacgaggcaggga

SEQ ID NO: 20030 - DNA, 31 bp, Artificial Sequence
  Description of Artificial Sequence:  Enzymatic Nucleic Acid
ctcttcaaggctagctacaacgaacggcagg

SEQ ID NO: 20031 - DNA, 31 bp, Artificial Sequence
  Description of Artificial Sequence:  Enzymatic Nucleic Acid
agtcagaaggctagctacaacgatcttcaac

SEQ ID NO: 20032 - DNA, 31 bp, Artificial Sequence
  Description of Artificial Sequence:  Enzymatic Nucleic Acid
ttgtgcagggctagctacaacgacagaactc

SEQ ID NO: 20033 - DNA, 31 bp, Artificial Sequence
  Description of Artificial Sequence:  Enzymatic Nucleic Acid
ggtttgtgggctagctacaacgaagtcagaa

SEQ ID NO: 20034 - DNA, 31 bp, Artificial Sequence
  Description of Artificial Sequence:  Enzymatic Nucleic Acid
ctggtttgggctagctacaacgagcagtcag

SEQ ID NO: 20035 - DNA, 31 bp, Artificial Sequence
  Description of Artificial Sequence:  Enzymatic Nucleic Acid
gaagctggggctagctacaacgattgtgcag

SEQ ID NO: 20036 - DNA, 31 bp, Artificial Sequence
  Description of Artificial Sequence:  Enzymatic Nucleic Acid
accagaagggctagctacaacgatggtttgt

SEQ ID NO: 20037 - DNA, 31 bp, Artificial Sequence
  Description of Artificial Sequence:  Enzymatic Nucleic Acid
agaagaaaggctagctacaacgacagaagct

SEQ ID NO: 20038 - DNA, 31 bp, Artificial Sequence
  Description of Artificial Sequence:  Enzymatic Nucleic Acid
ggtattcaggctagctacaacgatccagaag

SEQ ID NO: 20039 - DNA, 31 bp, Artificial Sequence
  Description of Artificial Sequence:  Enzymatic Nucleic Acid
tgagggtaggctagctacaacgatcattcca

SEQ ID NO: 20040 - DNA, 31 bp, Artificial Sequence
  Description of Artificial Sequence:  Enzymatic Nucleic Acid
tatgagggggctagctacaacgaattcattc

SEQ ID NO: 20041 - DNA, 31 bp, Artificial Sequence
  Description of Artificial Sequence:  Enzymatic Nucleic Acid
gacagataggctagctacaacgagagggtat

SEQ ID NO: 20042 - DNA, 31 bp, Artificial Sequence
  Description of Artificial Sequence:  Enzymatic Nucleic Acid
aggacagaggctagctacaacgaatgagggt

SEQ ID NO: 20043 - DNA, 31 bp, Artificial Sequence
  Description of Artificial Sequence:  Enzymatic Nucleic Acid
catcaggaggctagctacaacgaagatatga

SEQ ID NO: 20044 - DNA, 31 bp, Artificial Sequence
  Description of Artificial Sequence:  Enzymatic Nucleic Acid
atatcacaggctagctacaacgacaggacag

SEQ ID NO: 20045 - DNA, 31 bp, Artificial Sequence
  Description of Artificial Sequence:  Enzymatic Nucleic Acid
acatatcaggctagctacaacgaatcaggac

SEQ ID NO: 20046 - DNA, 31 bp, Artificial Sequence
  Description of Artificial Sequence:  Enzymatic Nucleic Acid
cagacataggctagctacaacgacacatcag

SEQ ID NO: 20047 - DNA, 31 bp, Artificial Sequence
  Description of Artificial Sequence:  Enzymatic Nucleic Acid
ctcagacaggctagctacaacgaatcacatc

SEQ ID NO: 20048 - DNA, 31 bp, Artificial Sequence
  Description of Artificial Sequence:  Enzymatic Nucleic Acid
gtctcagaggctagctacaacgaatatcaca

SEQ ID NO: 20049 - DNA, 31 bp, Artificial Sequence
  Description of Artificial Sequence:  Enzymatic Nucleic Acid
gcattcagggctagctacaacgactcagaca

SEQ ID NO: 20050 - DNA, 31 bp, Artificial Sequence
  Description of Artificial Sequence:  Enzymatic Nucleic Acid
ctcccgcaggctagctacaacgatcagtctc

SEQ ID NO: 20051 - DNA, 31 bp, Artificial Sequence
  Description of Artificial Sequence:  Enzymatic Nucleic Acid
acctcccgggctagctacaacgaattcagtc

SEQ ID NO: 20052 - DNA, 31 bp, Artificial Sequence
  Description of Artificial Sequence:  Enzymatic Nucleic Acid
acattgaaggctagctacaacgactcccgca

SEQ ID NO: 20053 - DNA, 31 bp, Artificial Sequence
  Description of Artificial Sequence:  Enzymatic Nucleic Acid
gcttcacaggctagctacaacgatgaacctc

SEQ ID NO: 20054 - DNA, 31 bp, Artificial Sequence
  Description of Artificial Sequence:  Enzymatic Nucleic Acid
cagcttcaggctagctacaacgaattgaacc

SEQ ID NO: 20055 - DNA, 31 bp, Artificial Sequence
  Description of Artificial Sequence:  Enzymatic Nucleic Acid
acacacagggctagctacaacgattcacatt

SEQ ID NO: 20056 - DNA, 31 bp, Artificial Sequence
  Description of Artificial Sequence:  Enzymatic Nucleic Acid
accacacaggctagctacaacgaagcttcac

SEQ ID NO: 20057 - DNA, 31 bp, Artificial Sequence
  Description of Artificial Sequence:  Enzymatic Nucleic Acid
acaccacaggctagctacaacgaacagcttc

SEQ ID NO: 20058 - DNA, 31 bp, Artificial Sequence
  Description of Artificial Sequence:  Enzymatic Nucleic Acid
tgacaccaggctagctacaacgaacacagct

SEQ ID NO: 20059 - DNA, 31 bp, Artificial Sequence
  Description of Artificial Sequence:  Enzymatic Nucleic Acid
ctttgacaggctagctacaacgacacacaca

SEQ ID NO: 20060 - DNA, 31 bp, Artificial Sequence
  Description of Artificial Sequence:  Enzymatic Nucleic Acid
aactttgaggctagctacaacgaaccacaca

SEQ ID NO: 20061 - DNA, 31 bp, Artificial Sequence
  Description of Artificial Sequence:  Enzymatic Nucleic Acid
tcctgaaaggctagctacaacgatttgacac

SEQ ID NO: 20062 - DNA, 31 bp, Artificial Sequence
  Description of Artificial Sequence:  Enzymatic Nucleic Acid
gggtaaaaggctagctacaacgaccttcctg

SEQ ID NO: 20063 - DNA, 31 bp, Artificial Sequence
  Description of Artificial Sequence:  Enzymatic Nucleic Acid
caaaagggggctagctacaacgaaaaatcct

SEQ ID NO: 20064 - DNA, 31 bp, Artificial Sequence
  Description of Artificial Sequence:  Enzymatic Nucleic Acid
gggaagaaggctagctacaacgaaaaagggt

SEQ ID NO: 20065 - DNA, 31 bp, Artificial Sequence
  Description of Artificial Sequence:  Enzymatic Nucleic Acid
gttggggaggctagctacaacgaagggggaa

SEQ ID NO: 20066 - DNA, 31 bp, Artificial Sequence
  Description of Artificial Sequence:  Enzymatic Nucleic Acid
agagtgggggctagctacaacgatggggaca

SEQ ID NO: 20067 - DNA, 31 bp, Artificial Sequence
  Description of Artificial Sequence:  Enzymatic Nucleic Acid
ggtgagagggctagctacaacgagggttggg

SEQ ID NO: 20068 - DNA, 31 bp, Artificial Sequence
  Description of Artificial Sequence:  Enzymatic Nucleic Acid
ttgcggggggctagctacaacgagagagtgg

SEQ ID NO: 20069 - DNA, 31 bp, Artificial Sequence
  Description of Artificial Sequence:  Enzymatic Nucleic Acid
atgggttgggctagctacaacgaggggtgag

SEQ ID NO: 20070 - DNA, 31 bp, Artificial Sequence
  Description of Artificial Sequence:  Enzymatic Nucleic Acid
ctgatgggggctagctacaacgatgcggggt

SEQ ID NO: 20071 - DNA, 31 bp, Artificial Sequence
  Description of Artificial Sequence:  Enzymatic Nucleic Acid
aatactgaggctagctacaacgagggttgcg

SEQ ID NO: 20072 - DNA, 31 bp, Artificial Sequence
  Description of Artificial Sequence:  Enzymatic Nucleic Acid
ctaaaataggctagctacaacgatgatgggt

SEQ ID NO: 20073 - DNA, 31 bp, Artificial Sequence
  Description of Artificial Sequence:  Enzymatic Nucleic Acid
aactaaaaggctagctacaacgaactgatgg

SEQ ID NO: 20074 - DNA, 31 bp, Artificial Sequence
  Description of Artificial Sequence:  Enzymatic Nucleic Acid
ccaaataaggctagctacaacgataaaatac

SEQ ID NO: 20075 - DNA, 31 bp, Artificial Sequence
  Description of Artificial Sequence:  Enzymatic Nucleic Acid
aggccaaaggctagctacaacgaaactaaaa

SEQ ID NO: 20076 - DNA, 31 bp, Artificial Sequence
  Description of Artificial Sequence:  Enzymatic Nucleic Acid
agtagaggggctagctacaacgacaaataac

SEQ ID NO: 20077 - DNA, 31 bp, Artificial Sequence
  Description of Artificial Sequence:  Enzymatic Nucleic Acid
tactggagggctagctacaacgaagaggcca

SEQ ID NO: 20078 - DNA, 31 bp, Artificial Sequence
  Description of Artificial Sequence:  Enzymatic Nucleic Acid
caggtttaggctagctacaacgatggagtag

SEQ ID NO: 20079 - DNA, 31 bp, Artificial Sequence
  Description of Artificial Sequence:  Enzymatic Nucleic Acid
caatcaggggctagctacaacgattactgga

SEQ ID NO: 20080 - DNA, 31 bp, Artificial Sequence
  Description of Artificial Sequence:  Enzymatic Nucleic Acid
aaacccaaggctagctacaacgacaggttta

SEQ ID NO: 20081 - DNA, 31 bp, Artificial Sequence
  Description of Artificial Sequence:  Enzymatic Nucleic Acid
tgaacaaaggctagctacaacgaccaatcag

SEQ ID NO: 20082 - DNA, 31 bp, Artificial Sequence
  Description of Artificial Sequence:  Enzymatic Nucleic Acid
agagtgaaggctagctacaacgaaaacccaa

SEQ ID NO: 20083 - DNA, 31 bp, Artificial Sequence
  Description of Artificial Sequence:  Enzymatic Nucleic Acid
tcagagagggctagctacaacgagaacaaac

SEQ ID NO: 20084 - DNA, 31 bp, Artificial Sequence
  Description of Artificial Sequence:  Enzymatic Nucleic Acid
aataatcaggctagctacaacgatcagagag

SEQ ID NO: 20085 - DNA, 31 bp, Artificial Sequence
  Description of Artificial Sequence:  Enzymatic Nucleic Acid
gctaataaggctagctacaacgacattcaga

SEQ ID NO: 20086 - DNA, 31 bp, Artificial Sequence
  Description of Artificial Sequence:  Enzymatic Nucleic Acid
ctggctaaggctagctacaacgaaatcattc

SEQ ID NO: 20087 - DNA, 31 bp, Artificial Sequence
  Description of Artificial Sequence:  Enzymatic Nucleic Acid
aagtctggggctagctacaacgataataatc

SEQ ID NO: 20088 - DNA, 31 bp, Artificial Sequence
  Description of Artificial Sequence:  Enzymatic Nucleic Acid
ttttgaagggctagctacaacgactggctaa

SEQ ID NO: 20089 - DNA, 31 bp, Artificial Sequence
  Description of Artificial Sequence:  Enzymatic Nucleic Acid
taaaataaggctagctacaacgatttgaagt

SEQ ID NO: 20090 - DNA, 31 bp, Artificial Sequence
  Description of Artificial Sequence:  Enzymatic Nucleic Acid
ctataaaaggctagctacaacgaaattttga

SEQ ID NO: 20091 - DNA, 31 bp, Artificial Sequence
  Description of Artificial Sequence:  Enzymatic Nucleic Acid
ttgggctaggctagctacaacgaaaaataat

SEQ ID NO: 20092 - DNA, 31 bp, Artificial Sequence
  Description of Artificial Sequence:  Enzymatic Nucleic Acid
aatttgggggctagctacaacgatataaaat

SEQ ID NO: 20093 - DNA, 31 bp, Artificial Sequence
  Description of Artificial Sequence:  Enzymatic Nucleic Acid
tgttataaggctagctacaacgattgggcta

SEQ ID NO: 20094 - DNA, 31 bp, Artificial Sequence
  Description of Artificial Sequence:  Enzymatic Nucleic Acid
agatgttaggctagctacaacgaaatttggg

SEQ ID NO: 20095 - DNA, 31 bp, Artificial Sequence
  Description of Artificial Sequence:  Enzymatic Nucleic Acid
aatagatgggctagctacaacgatataattt

SEQ ID NO: 20096 - DNA, 31 bp, Artificial Sequence
  Description of Artificial Sequence:  Enzymatic Nucleic Acid
acaatagaggctagctacaacgagttataat

SEQ ID NO: 20097 - DNA, 31 bp, Artificial Sequence
  Description of Artificial Sequence:  Enzymatic Nucleic Acid
taatacaaggctagctacaacgaagatgtta

SEQ ID NO: 20098 - DNA, 31 bp, Artificial Sequence
  Description of Artificial Sequence:  Enzymatic Nucleic Acid
aaataataggctagctacaacgaaatagatg

SEQ ID NO: 20099 - DNA, 31 bp, Artificial Sequence
  Description of Artificial Sequence:  Enzymatic Nucleic Acid
ctaaataaggctagctacaacgaacaataga

SEQ ID NO: 20100 - DNA, 31 bp, Artificial Sequence
  Description of Artificial Sequence:  Enzymatic Nucleic Acid
agtctaaaggctagctacaacgaaatacaat

SEQ ID NO: 20101 - DNA, 31 bp, Artificial Sequence
  Description of Artificial Sequence:  Enzymatic Nucleic Acid
gttaaaagggctagctacaacgactaaataa

SEQ ID NO: 20102 - DNA, 31 bp, Artificial Sequence
  Description of Artificial Sequence:  Enzymatic Nucleic Acid
tctatatgggctagctacaacgataaaagtc

SEQ ID NO: 20103 - DNA, 31 bp, Artificial Sequence
  Description of Artificial Sequence:  Enzymatic Nucleic Acid
gctctataggctagctacaacgagttaaaag

SEQ ID NO: 20104 - DNA, 31 bp, Artificial Sequence
  Description of Artificial Sequence:  Enzymatic Nucleic Acid
tagctctaggctagctacaacgaatgttaaa

SEQ ID NO: 20105 - DNA, 31 bp, Artificial Sequence
  Description of Artificial Sequence:  Enzymatic Nucleic Acid
agaaatagggctagctacaacgatctatatg

SEQ ID NO: 20106 - DNA, 31 bp, Artificial Sequence
  Description of Artificial Sequence:  Enzymatic Nucleic Acid
agtagaaaggctagctacaacgaagctctat

SEQ ID NO: 20107 - DNA, 31 bp, Artificial Sequence
  Description of Artificial Sequence:  Enzymatic Nucleic Acid
aaaatcagggctagctacaacgaagaaatag

SEQ ID NO: 20108 - DNA, 31 bp, Artificial Sequence
  Description of Artificial Sequence:  Enzymatic Nucleic Acid
ggcaaaaaggctagctacaacgacagtagaa

SEQ ID NO: 20109 - DNA, 31 bp, Artificial Sequence
  Description of Artificial Sequence:  Enzymatic Nucleic Acid
aacaagggggctagctacaacgaaaaaatca

SEQ ID NO: 20110 - DNA, 31 bp, Artificial Sequence
  Description of Artificial Sequence:  Enzymatic Nucleic Acid
ggacagaaggctagctacaacgaaagggcaa

SEQ ID NO: 20111 - DNA, 31 bp, Artificial Sequence
  Description of Artificial Sequence:  Enzymatic Nucleic Acid
aaaaaggaggctagctacaacgaagaacaag

SEQ ID NO: 20112 - DNA, 31 bp, Artificial Sequence
  Description of Artificial Sequence:  Enzymatic Nucleic Acid
aaaacacaggctagctacaacgatttctttt

SEQ ID NO: 20113 - DNA, 31 bp, Artificial Sequence
  Description of Artificial Sequence:  Enzymatic Nucleic Acid
aaaaaacaggctagctacaacgaattttctt

SEQ ID NO: 20114 - DNA, 31 bp, Artificial Sequence
  Description of Artificial Sequence:  Enzymatic Nucleic Acid
acaaaaaaggctagctacaacgaacattttc

SEQ ID NO: 20115 - DNA, 31 bp, Artificial Sequence
  Description of Artificial Sequence:  Enzymatic Nucleic Acid
gtaccaaaggctagctacaacgaaaaaaaca

SEQ ID NO: 20116 - DNA, 31 bp, Artificial Sequence
  Description of Artificial Sequence:  Enzymatic Nucleic Acid
ctatggtaggctagctacaacgacaaacaaa

SEQ ID NO: 20117 - DNA, 31 bp, Artificial Sequence
  Description of Artificial Sequence:  Enzymatic Nucleic Acid
cactatggggctagctacaacgaaccaaaca

SEQ ID NO: 20118 - DNA, 31 bp, Artificial Sequence
  Description of Artificial Sequence:  Enzymatic Nucleic Acid
tcacactaggctagctacaacgaggtaccaa

SEQ ID NO: 20119 - DNA, 31 bp, Artificial Sequence
  Description of Artificial Sequence:  Enzymatic Nucleic Acid
atttcacaggctagctacaacgatatggtac

SEQ ID NO: 20120 - DNA, 31 bp, Artificial Sequence
  Description of Artificial Sequence:  Enzymatic Nucleic Acid
gcatttcaggctagctacaacgaactatggt

SEQ ID NO: 20121 - DNA, 31 bp, Artificial Sequence
  Description of Artificial Sequence:  Enzymatic Nucleic Acid
tcccagcaggctagctacaacgattcacact

SEQ ID NO: 20122 - DNA, 31 bp, Artificial Sequence
  Description of Artificial Sequence:  Enzymatic Nucleic Acid
gttcccagggctagctacaacgaatttcaca

SEQ ID NO: 20123 - DNA, 31 bp, Artificial Sequence
  Description of Artificial Sequence:  Enzymatic Nucleic Acid
agtcattgggctagctacaacgatcccagca

SEQ ID NO: 20124 - DNA, 31 bp, Artificial Sequence
  Description of Artificial Sequence:  Enzymatic Nucleic Acid
tatagtcaggctagctacaacgatgttccca

SEQ ID NO: 20125 - DNA, 31 bp, Artificial Sequence
  Description of Artificial Sequence:  Enzymatic Nucleic Acid
tcttatagggctagctacaacgacattgttc

SEQ ID NO: 20126 - DNA, 31 bp, Artificial Sequence
  Description of Artificial Sequence:  Enzymatic Nucleic Acid
atgtcttaggctagctacaacgaagtcattg

SEQ ID NO: 20127 - DNA, 31 bp, Artificial Sequence
  Description of Artificial Sequence:  Enzymatic Nucleic Acid
atagcatgggctagctacaacgacttatagt

SEQ ID NO: 20128 - DNA, 31 bp, Artificial Sequence
  Description of Artificial Sequence:  Enzymatic Nucleic Acid
ccatagcaggctagctacaacgagtcttata

SEQ ID NO: 20129 - DNA, 31 bp, Artificial Sequence
  Description of Artificial Sequence:  Enzymatic Nucleic Acid
tgccatagggctagctacaacgaatgtctta

SEQ ID NO: 20130 - DNA, 31 bp, Artificial Sequence
  Description of Artificial Sequence:  Enzymatic Nucleic Acid
atgtgccaggctagctacaacgaagcatgtc

SEQ ID NO: 20131 - DNA, 31 bp, Artificial Sequence
  Description of Artificial Sequence:  Enzymatic Nucleic Acid
tatatgtgggctagctacaacgacatagcat

SEQ ID NO: 20132 - DNA, 31 bp, Artificial Sequence
  Description of Artificial Sequence:  Enzymatic Nucleic Acid
aatatatgggctagctacaacgagccatagc

SEQ ID NO: 20133 - DNA, 31 bp, Artificial Sequence
  Description of Artificial Sequence:  Enzymatic Nucleic Acid
taaatataggctagctacaacgagtgccata

SEQ ID NO: 20134 - DNA, 31 bp, Artificial Sequence
  Description of Artificial Sequence:  Enzymatic Nucleic Acid
tataaataggctagctacaacgaatgtgcca

SEQ ID NO: 20135 - DNA, 31 bp, Artificial Sequence
  Description of Artificial Sequence:  Enzymatic Nucleic Acid
actataaaggctagctacaacgaatatgtgc

SEQ ID NO: 20136 - DNA, 31 bp, Artificial Sequence
  Description of Artificial Sequence:  Enzymatic Nucleic Acid
acagactaggctagctacaacgaaaatatat

SEQ ID NO: 20137 - DNA, 31 bp, Artificial Sequence
  Description of Artificial Sequence:  Enzymatic Nucleic Acid
taaacagaggctagctacaacgatataaata

SEQ ID NO: 20138 - DNA, 31 bp, Artificial Sequence
  Description of Artificial Sequence:  Enzymatic Nucleic Acid
tacataaaggctagctacaacgaagactata

SEQ ID NO: 20139 - DNA, 31 bp, Artificial Sequence
  Description of Artificial Sequence:  Enzymatic Nucleic Acid
tttctacaggctagctacaacgaaaacagac

SEQ ID NO: 20140 - DNA, 31 bp, Artificial Sequence
  Description of Artificial Sequence:  Enzymatic Nucleic Acid
tgtttctaggctagctacaacgaataaacag

SEQ ID NO: 20141 - DNA, 31 bp, Artificial Sequence
  Description of Artificial Sequence:  Enzymatic Nucleic Acid
tacatttgggctagctacaacgattctacat

SEQ ID NO: 20142 - DNA, 31 bp, Artificial Sequence
  Description of Artificial Sequence:  Enzymatic Nucleic Acid
atattacaggctagctacaacgattgtttct

SEQ ID NO: 20143 - DNA, 31 bp, Artificial Sequence
  Description of Artificial Sequence:  Enzymatic Nucleic Acid
atatattaggctagctacaacgaatttgttt

SEQ ID NO: 20144 - DNA, 31 bp, Artificial Sequence
  Description of Artificial Sequence:  Enzymatic Nucleic Acid
ttaatataggctagctacaacgatacatttg

SEQ ID NO: 20145 - DNA, 31 bp, Artificial Sequence
  Description of Artificial Sequence:  Enzymatic Nucleic Acid
ctttaataggctagctacaacgaattacatt

SEQ ID NO: 20146 - DNA, 31 bp, Artificial Sequence
  Description of Artificial Sequence:  Enzymatic Nucleic Acid
ggctttaaggctagctacaacgaatattaca

SEQ ID NO: 20147 - DNA, 31 bp, Artificial Sequence
  Description of Artificial Sequence:  Enzymatic Nucleic Acid
atataaggggctagctacaacgatttaatat

SEQ ID NO: 20148 - DNA, 31 bp, Artificial Sequence
  Description of Artificial Sequence:  Enzymatic Nucleic Acid
attatataggctagctacaacgaaaggcttt

SEQ ID NO: 20149 - DNA, 31 bp, Artificial Sequence
  Description of Artificial Sequence:  Enzymatic Nucleic Acid
tcattataggctagctacaacgaataaggct

SEQ ID NO: 20150 - DNA, 31 bp, Artificial Sequence
  Description of Artificial Sequence:  Enzymatic Nucleic Acid
gttcattaggctagctacaacgaatataagg

SEQ ID NO: 20151 - DNA, 31 bp, Artificial Sequence
  Description of Artificial Sequence:  Enzymatic Nucleic Acid
aaagttcaggctagctacaacgatatatata

SEQ ID NO: 20152 - DNA, 31 bp, Artificial Sequence
  Description of Artificial Sequence:  Enzymatic Nucleic Acid
gtacaaagggctagctacaacgatcattata

SEQ ID NO: 20153 - DNA, 31 bp, Artificial Sequence
  Description of Artificial Sequence:  Enzymatic Nucleic Acid
gaatagtaggctagctacaacgaaaagttca

SEQ ID NO: 20154 - DNA, 31 bp, Artificial Sequence
  Description of Artificial Sequence:  Enzymatic Nucleic Acid
gtgaatagggctagctacaacgaacaaagtt

SEQ ID NO: 20155 - DNA, 31 bp, Artificial Sequence
  Description of Artificial Sequence:  Enzymatic Nucleic Acid
aatgtgaaggctagctacaacgaagtacaaa

SEQ ID NO: 20156 - DNA, 31 bp, Artificial Sequence
  Description of Artificial Sequence:  Enzymatic Nucleic Acid
acaaaatgggctagctacaacgagaatagta

SEQ ID NO: 20157 - DNA, 31 bp, Artificial Sequence
  Description of Artificial Sequence:  Enzymatic Nucleic Acid
atacaaaaggctagctacaacgagtgaatag

SEQ ID NO: 20158 - DNA, 31 bp, Artificial Sequence
  Description of Artificial Sequence:  Enzymatic Nucleic Acid
tactgataggctagctacaacgaaaaatgtg

SEQ ID NO: 20159 - DNA, 31 bp, Artificial Sequence
  Description of Artificial Sequence:  Enzymatic Nucleic Acid
aatactgaggctagctacaacgaacaaaatg

SEQ ID NO: 20160 - DNA, 31 bp, Artificial Sequence
  Description of Artificial Sequence:  Enzymatic Nucleic Acid
acataataggctagctacaacgatgatacaa

SEQ ID NO: 20161 - DNA, 31 bp, Artificial Sequence
  Description of Artificial Sequence:  Enzymatic Nucleic Acid
ctacataaggctagctacaacgaactgatac

SEQ ID NO: 20162 - DNA, 31 bp, Artificial Sequence
  Description of Artificial Sequence:  Enzymatic Nucleic Acid
atgctacaggctagctacaacgaaatactga

SEQ ID NO: 20163 - DNA, 31 bp, Artificial Sequence
  Description of Artificial Sequence:  Enzymatic Nucleic Acid
ttatgctaggctagctacaacgaataatact

SEQ ID NO: 20164 - DNA, 31 bp, Artificial Sequence
  Description of Artificial Sequence:  Enzymatic Nucleic Acid
ttgttatgggctagctacaacgatacataat

SEQ ID NO: 20165 - DNA, 31 bp, Artificial Sequence
  Description of Artificial Sequence:  Enzymatic Nucleic Acid
ctttgttaggctagctacaacgagctacata

SEQ ID NO: 20166 - DNA, 31 bp, Artificial Sequence
  Description of Artificial Sequence:  Enzymatic Nucleic Acid
gacctttgggctagctacaacgatatgctac

SEQ ID NO: 20167 - DNA, 31 bp, Artificial Sequence
  Description of Artificial Sequence:  Enzymatic Nucleic Acid
cattatgaggctagctacaacgactttgtta

SEQ ID NO: 20168 - DNA, 31 bp, Artificial Sequence
  Description of Artificial Sequence:  Enzymatic Nucleic Acid
aagcattaggctagctacaacgagacctttg

SEQ ID NO: 20169 - DNA, 31 bp, Artificial Sequence
  Description of Artificial Sequence:  Enzymatic Nucleic Acid
tgaaagcaggctagctacaacgatatgacct

SEQ ID NO: 20170 - DNA, 31 bp, Artificial Sequence
  Description of Artificial Sequence:  Enzymatic Nucleic Acid
gctgaaagggctagctacaacgaattatgac

SEQ ID NO: 20171 - DNA, 31 bp, Artificial Sequence
  Description of Artificial Sequence:  Enzymatic Nucleic Acid
atcaattgggctagctacaacgatgaaagca

SEQ ID NO: 20172 - DNA, 31 bp, Artificial Sequence
  Description of Artificial Sequence:  Enzymatic Nucleic Acid
gacatcaaggctagctacaacgatgctgaaa

SEQ ID NO: 20173 - DNA, 31 bp, Artificial Sequence
  Description of Artificial Sequence:  Enzymatic Nucleic Acid
aaatgacaggctagctacaacgacaattgct

SEQ ID NO: 20174 - DNA, 31 bp, Artificial Sequence
  Description of Artificial Sequence:  Enzymatic Nucleic Acid
taaaatgaggctagctacaacgaatcaattg

SEQ ID NO: 20175 - DNA, 31 bp, Artificial Sequence
  Description of Artificial Sequence:  Enzymatic Nucleic Acid
taataaaaggctagctacaacgagacatcaa

SEQ ID NO: 20176 - DNA, 31 bp, Artificial Sequence
  Description of Artificial Sequence:  Enzymatic Nucleic Acid
ttctttaaggctagctacaacgaaaaatgac

SEQ ID NO: 20177 - DNA, 31 bp, Artificial Sequence
  Description of Artificial Sequence:  Enzymatic Nucleic Acid
tttcaatgggctagctacaacgatctttaat

SEQ ID NO: 20178 - DNA, 31 bp, Artificial Sequence
  Description of Artificial Sequence:  Enzymatic Nucleic Acid
tttttcaaggctagctacaacgagttcttta

SEQ ID NO: 20179 - RNA, 37 nt, Artificial Sequence
  Description of Artificial Sequence:  Enzymatic Nucleic Acid
acugaccggccgaaaggcgagugaggucuucucccgg

SEQ ID NO: 20180 - RNA, 37 nt, Artificial Sequence
  Description of Artificial Sequence:  Enzymatic Nucleic Acid
cacacugagccgaaaggcgagugaggucucgcucucc

SEQ ID NO: 20181 - RNA, 37 nt, Artificial Sequence
  Description of Artificial Sequence:  Enzymatic Nucleic Acid
accacacagccgaaaggcgagugaggucuugaccgcu

SEQ ID NO: 20182 - RNA, 37 nt, Artificial Sequence
  Description of Artificial Sequence:  Enzymatic Nucleic Acid
cgaccacagccgaaaggcgagugaggucuacugaccg

SEQ ID NO: 20183 - RNA, 37 nt, Artificial Sequence
  Description of Artificial Sequence:  Enzymatic Nucleic Acid
agcgaccagccgaaaggcgagugaggucuacacugac

SEQ ID NO: 20184 - RNA, 37 nt, Artificial Sequence
  Description of Artificial Sequence:  Enzymatic Nucleic Acid
cgcagcgagccgaaaggcgagugaggucucacacacu

SEQ ID NO: 20185 - RNA, 37 nt, Artificial Sequence
  Description of Artificial Sequence:  Enzymatic Nucleic Acid
aaacgcaggccgaaaggcgagugaggucugaccacac

SEQ ID NO: 20186 - RNA, 37 nt, Artificial Sequence
  Description of Artificial Sequence:  Enzymatic Nucleic Acid
aggaaacggccgaaaggcgagugaggucuagcgacca

SEQ ID NO: 20187 - RNA, 37 nt, Artificial Sequence
  Description of Artificial Sequence:  Enzymatic Nucleic Acid
agaggaaagccgaaaggcgagugaggucugcagcgac

SEQ ID NO: 20188 - RNA, 37 nt, Artificial Sequence
  Description of Artificial Sequence:  Enzymatic Nucleic Acid
ggcgcagggccgaaaggcgagugaggucuagaggaaa

SEQ ID NO: 20189 - RNA, 37 nt, Artificial Sequence
  Description of Artificial Sequence:  Enzymatic Nucleic Acid
gcccggcggccgaaaggcgagugaggucuaggcagag

SEQ ID NO: 20190 - RNA, 37 nt, Artificial Sequence
  Description of Artificial Sequence:  Enzymatic Nucleic Acid
augcccgggccgaaaggcgagugaggucugcaggcag

SEQ ID NO: 20191 - RNA, 37 nt, Artificial Sequence
  Description of Artificial Sequence:  Enzymatic Nucleic Acid
aagugauggccgaaaggcgagugaggucuccggcgca

SEQ ID NO: 20192 - RNA, 37 nt, Artificial Sequence
  Description of Artificial Sequence:  Enzymatic Nucleic Acid
gcggcgcggccgaaaggcgagugaggucuaagugaug

SEQ ID NO: 20193 - RNA, 37 nt, Artificial Sequence
  Description of Artificial Sequence:  Enzymatic Nucleic Acid
cugcggcggccgaaaggcgagugaggucugcaaguga

SEQ ID NO: 20194 - RNA, 37 nt, Artificial Sequence
  Description of Artificial Sequence:  Enzymatic Nucleic Acid
uucugcgggccgaaaggcgagugaggucugcgcaagu

SEQ ID NO: 20195 - RNA, 37 nt, Artificial Sequence
  Description of Artificial Sequence:  Enzymatic Nucleic Acid
acuuucuggccgaaaggcgagugaggucuggcgcgca

SEQ ID NO: 20196 - RNA, 37 nt, Artificial Sequence
  Description of Artificial Sequence:  Enzymatic Nucleic Acid
cagacggagccgaaaggcgagugaggucuuuucugcg

SEQ ID NO: 20197 - RNA, 37 nt, Artificial Sequence
  Description of Artificial Sequence:  Enzymatic Nucleic Acid
cugccagagccgaaaggcgagugaggucuggacuuuc

SEQ ID NO: 20198 - RNA, 37 nt, Artificial Sequence
  Description of Artificial Sequence:  Enzymatic Nucleic Acid
ccaggcuggccgaaaggcgagugaggucucagacgga

SEQ ID NO: 20199 - RNA, 37 nt, Artificial Sequence
  Description of Artificial Sequence:  Enzymatic Nucleic Acid
uauccagggccgaaaggcgagugaggucuugccagac

SEQ ID NO: 20200 - RNA, 37 nt, Artificial Sequence
  Description of Artificial Sequence:  Enzymatic Nucleic Acid
ugcggguggccgaaaggcgagugaggucucgguagga

SEQ ID NO: 20201 - RNA, 37 nt, Artificial Sequence
  Description of Artificial Sequence:  Enzymatic Nucleic Acid
ggcgucuggccgaaaggcgagugaggucugggugccg

SEQ ID NO: 20202 - RNA, 37 nt, Artificial Sequence
  Description of Artificial Sequence:  Enzymatic Nucleic Acid
ugcagggggccgaaaggcgagugaggucugucugcgg

SEQ ID NO: 20203 - RNA, 37 nt, Artificial Sequence
  Description of Artificial Sequence:  Enzymatic Nucleic Acid
ggcggcuggccgaaaggcgagugaggucuaggggcgu

SEQ ID NO: 20204 - RNA, 37 nt, Artificial Sequence
  Description of Artificial Sequence:  Enzymatic Nucleic Acid
accggcgggccgaaaggcgagugaggucuugcagggg

SEQ ID NO: 20205 - RNA, 37 nt, Artificial Sequence
  Description of Artificial Sequence:  Enzymatic Nucleic Acid
ccgaccgggccgaaaggcgagugaggucuggcugcag

SEQ ID NO: 20206 - RNA, 37 nt, Artificial Sequence
  Description of Artificial Sequence:  Enzymatic Nucleic Acid
ggcgccgagccgaaaggcgagugaggucucggcggcu

SEQ ID NO: 20207 - RNA, 37 nt, Artificial Sequence
  Description of Artificial Sequence:  Enzymatic Nucleic Acid
cccgggcggccgaaaggcgagugaggucucgaccggc

SEQ ID NO: 20208 - RNA, 37 nt, Artificial Sequence
  Description of Artificial Sequence:  Enzymatic Nucleic Acid
agcccggggccgaaaggcgagugaggucugccgaccg

SEQ ID NO: 20209 - RNA, 37 nt, Artificial Sequence
  Description of Artificial Sequence:  Enzymatic Nucleic Acid
cuagggaggccgaaaggcgagugaggucuccgggcgc

SEQ ID NO: 20210 - RNA, 37 nt, Artificial Sequence
  Description of Artificial Sequence:  Enzymatic Nucleic Acid
gcacaggggccgaaaggcgagugaggucuuagggagc

SEQ ID NO: 20211 - RNA, 37 nt, Artificial Sequence
  Description of Artificial Sequence:  Enzymatic Nucleic Acid
ugagcgcagccgaaaggcgagugaggucuagggcuag

SEQ ID NO: 20212 - RNA, 37 nt, Artificial Sequence
  Description of Artificial Sequence:  Enzymatic Nucleic Acid
guugagcggccgaaaggcgagugaggucuacagggcu

SEQ ID NO: 20213 - RNA, 37 nt, Artificial Sequence
  Description of Artificial Sequence:  Enzymatic Nucleic Acid
caguugaggccgaaaggcgagugaggucugcacaggg

SEQ ID NO: 20214 - RNA, 37 nt, Artificial Sequence
  Description of Artificial Sequence:  Enzymatic Nucleic Acid
gcgcaggagccgaaaggcgagugaggucuaguugagc

SEQ ID NO: 20215 - RNA, 37 nt, Artificial Sequence
  Description of Artificial Sequence:  Enzymatic Nucleic Acid
ccgcagcggccgaaaggcgagugaggucuaggacagu

SEQ ID NO: 20216 - RNA, 37 nt, Artificial Sequence
  Description of Artificial Sequence:  Enzymatic Nucleic Acid
ccccgcaggccgaaaggcgagugaggucugcaggaca

SEQ ID NO: 20217 - RNA, 37 nt, Artificial Sequence
  Description of Artificial Sequence:  Enzymatic Nucleic Acid
gcaccccggccgaaaggcgagugaggucuagcgcagg

SEQ ID NO: 20218 - RNA, 37 nt, Artificial Sequence
  Description of Artificial Sequence:  Enzymatic Nucleic Acid
ucgcggcagccgaaaggcgagugaggucucccgcagc

SEQ ID NO: 20219 - RNA, 37 nt, Artificial Sequence
  Description of Artificial Sequence:  Enzymatic Nucleic Acid
acucgcgggccgaaaggcgagugaggucuaccccgca

SEQ ID NO: 20220 - RNA, 37 nt, Artificial Sequence
  Description of Artificial Sequence:  Enzymatic Nucleic Acid
ggaacucggccgaaaggcgagugaggucuggcacccc

SEQ ID NO: 20221 - RNA, 37 nt, Artificial Sequence
  Description of Artificial Sequence:  Enzymatic Nucleic Acid
agguggaagccgaaaggcgagugaggucuucgcggca

SEQ ID NO: 20222 - RNA, 37 nt, Artificial Sequence
  Description of Artificial Sequence:  Enzymatic Nucleic Acid
aggaggcggccgaaaggcgagugaggucuggaggugg

SEQ ID NO: 20223 - RNA, 37 nt, Artificial Sequence
  Description of Artificial Sequence:  Enzymatic Nucleic Acid
gaaggagggccgaaaggcgagugaggucugcggaggu

SEQ ID NO: 20224 - RNA, 37 nt, Artificial Sequence
  Description of Artificial Sequence:  Enzymatic Nucleic Acid
ucccagcggccgaaaggcgagugaggucucugucuag

SEQ ID NO: 20225 - RNA, 37 nt, Artificial Sequence
  Description of Artificial Sequence:  Enzymatic Nucleic Acid
ucucccaggccgaaaggcgagugaggucugccugucu

SEQ ID NO: 20226 - RNA, 37 nt, Artificial Sequence
  Description of Artificial Sequence:  Enzymatic Nucleic Acid
cucgggaggccgaaaggcgagugaggucucgguucuu

SEQ ID NO: 20227 - RNA, 37 nt, Artificial Sequence
  Description of Artificial Sequence:  Enzymatic Nucleic Acid
gcccagaagccgaaaggcgagugaggucuucgggagc

SEQ ID NO: 20228 - RNA, 37 nt, Artificial Sequence
  Description of Artificial Sequence:  Enzymatic Nucleic Acid
gcgaaauggccgaaaggcgagugaggucuccagaacu

SEQ ID NO: 20229 - RNA, 37 nt, Artificial Sequence
  Description of Artificial Sequence:  Enzymatic Nucleic Acid
gagccggggccgaaaggcgagugaggucugaaaugcc

SEQ ID NO: 20230 - RNA, 37 nt, Artificial Sequence
  Description of Artificial Sequence:  Enzymatic Nucleic Acid
accucgaggccgaaaggcgagugaggucucgggcgaa

SEQ ID NO: 20231 - RNA, 37 nt, Artificial Sequence
  Description of Artificial Sequence:  Enzymatic Nucleic Acid
auccugcagccgaaaggcgagugaggucucucgagcc

SEQ ID NO: 20232 - RNA, 37 nt, Artificial Sequence
  Description of Artificial Sequence:  Enzymatic Nucleic Acid
gcauccuggccgaaaggcgagugaggucuaccucgag

SEQ ID NO: 20233 - RNA, 37 nt, Artificial Sequence
  Description of Artificial Sequence:  Enzymatic Nucleic Acid
uugcucuggccgaaaggcgagugaggucuauccugca

SEQ ID NO: 20234 - RNA, 37 nt, Artificial Sequence
  Description of Artificial Sequence:  Enzymatic Nucleic Acid
gcaccuuggccgaaaggcgagugaggucuucugcauc

SEQ ID NO: 20235 - RNA, 37 nt, Artificial Sequence
  Description of Artificial Sequence:  Enzymatic Nucleic Acid
cagcagcagccgaaaggcgagugaggucucuugcucu

SEQ ID NO: 20236 - RNA, 37 nt, Artificial Sequence
  Description of Artificial Sequence:  Enzymatic Nucleic Acid
gccagcaggccgaaaggcgagugaggucuaccuugcu

SEQ ID NO: 20237 - RNA, 37 nt, Artificial Sequence
  Description of Artificial Sequence:  Enzymatic Nucleic Acid
acggccaggccgaaaggcgagugaggucuagcaccuu

SEQ ID NO: 20238 - RNA, 37 nt, Artificial Sequence
  Description of Artificial Sequence:  Enzymatic Nucleic Acid
ggcgacgggccgaaaggcgagugaggucucagcagca

SEQ ID NO: 20239 - RNA, 37 nt, Artificial Sequence
  Description of Artificial Sequence:  Enzymatic Nucleic Acid
cagggcgagccgaaaggcgagugaggucuggccagca

SEQ ID NO: 20240 - RNA, 37 nt, Artificial Sequence
  Description of Artificial Sequence:  Enzymatic Nucleic Acid
ccacaggggccgaaaggcgagugaggucugacggcca

SEQ ID NO: 20241 - RNA, 37 nt, Artificial Sequence
  Description of Artificial Sequence:  Enzymatic Nucleic Acid
cagagccagccgaaaggcgagugaggucuagggcgac

SEQ ID NO: 20242 - RNA, 37 nt, Artificial Sequence
  Description of Artificial Sequence:  Enzymatic Nucleic Acid
acgcagaggccgaaaggcgagugaggucucacagggc

SEQ ID NO: 20243 - RNA, 37 nt, Artificial Sequence
  Description of Artificial Sequence:  Enzymatic Nucleic Acid
ucuccacggccgaaaggcgagugaggucuagagccac

SEQ ID NO: 20244 - RNA, 37 nt, Artificial Sequence
  Description of Artificial Sequence:  Enzymatic Nucleic Acid
ggucuccagccgaaaggcgagugaggucugcagagcc

SEQ ID NO: 20245 - RNA, 37 nt, Artificial Sequence
  Description of Artificial Sequence:  Enzymatic Nucleic Acid
agaggcgggccgaaaggcgagugaggucuccgggucu

SEQ ID NO: 20246 - RNA, 37 nt, Artificial Sequence
  Description of Artificial Sequence:  Enzymatic Nucleic Acid
cacagagggccgaaaggcgagugaggucuggcccggg

SEQ ID NO: 20247 - RNA, 37 nt, Artificial Sequence
  Description of Artificial Sequence:  Enzymatic Nucleic Acid
caaacccagccgaaaggcgagugaggucuagaggcgg

SEQ ID NO: 20248 - RNA, 37 nt, Artificial Sequence
  Description of Artificial Sequence:  Enzymatic Nucleic Acid
uaggcaaagccgaaaggcgagugaggucuccacagag

SEQ ID NO: 20249 - RNA, 37 nt, Artificial Sequence
  Description of Artificial Sequence:  Enzymatic Nucleic Acid
acacuagggccgaaaggcgagugaggucuaaacccac

SEQ ID NO: 20250 - RNA, 37 nt, Artificial Sequence
  Description of Artificial Sequence:  Enzymatic Nucleic Acid
gagaaacagccgaaaggcgagugaggucuuaggcaaa

SEQ ID NO: 20251 - RNA, 37 nt, Artificial Sequence
  Description of Artificial Sequence:  Enzymatic Nucleic Acid
aagagaaagccgaaaggcgagugaggucuacuaggca

SEQ ID NO: 20252 - RNA, 37 nt, Artificial Sequence
  Description of Artificial Sequence:  Enzymatic Nucleic Acid
agccuggggccgaaaggcgagugaggucuagaucaag

SEQ ID NO: 20253 - RNA, 37 nt, Artificial Sequence
  Description of Artificial Sequence:  Enzymatic Nucleic Acid
augcugaggccgaaaggcgagugaggucucugggcag

SEQ ID NO: 20254 - RNA, 37 nt, Artificial Sequence
  Description of Artificial Sequence:  Enzymatic Nucleic Acid
uuuguauggccgaaaggcgagugaggucuugagccug

SEQ ID NO: 20255 - RNA, 37 nt, Artificial Sequence
  Description of Artificial Sequence:  Enzymatic Nucleic Acid
uguauuaggccgaaaggcgagugaggucucuuaauug

SEQ ID NO: 20256 - RNA, 37 nt, Artificial Sequence
  Description of Artificial Sequence:  Enzymatic Nucleic Acid
guccccuggccgaaaggcgagugaggucuaaguaauu

SEQ ID NO: 20257 - RNA, 37 nt, Artificial Sequence
  Description of Artificial Sequence:  Enzymatic Nucleic Acid
ggccaaaggccgaaaggcgagugaggucucaguccaa

SEQ ID NO: 20258 - RNA, 37 nt, Artificial Sequence
  Description of Artificial Sequence:  Enzymatic Nucleic Acid
uuauuggggccgaaaggcgagugaggucucaaagcca

SEQ ID NO: 20259 - RNA, 37 nt, Artificial Sequence
  Description of Artificial Sequence:  Enzymatic Nucleic Acid
cacugccagccgaaaggcgagugaggucuucugauua

SEQ ID NO: 20260 - RNA, 37 nt, Artificial Sequence
  Description of Artificial Sequence:  Enzymatic Nucleic Acid
gcucacuggccgaaaggcgagugaggucucacucuga

SEQ ID NO: 20261 - RNA, 37 nt, Artificial Sequence
  Description of Artificial Sequence:  Enzymatic Nucleic Acid
uuugcucagccgaaaggcgagugaggucuugccacuc

SEQ ID NO: 20262 - RNA, 37 nt, Artificial Sequence
  Description of Artificial Sequence:  Enzymatic Nucleic Acid
acccuuuggccgaaaggcgagugaggucuucacugcc

SEQ ID NO: 20263 - RNA, 37 nt, Artificial Sequence
  Description of Artificial Sequence:  Enzymatic Nucleic Acid
caccuccagccgaaaggcgagugaggucuccuuugcu

SEQ ID NO: 20264 - RNA, 37 nt, Artificial Sequence
  Description of Artificial Sequence:  Enzymatic Nucleic Acid
cucagucagccgaaaggcgagugaggucucuccaccc

SEQ ID NO: 20265 - RNA, 37 nt, Artificial Sequence
  Description of Artificial Sequence:  Enzymatic Nucleic Acid
ucgcugcagccgaaaggcgagugaggucuucagucac

SEQ ID NO: 20266 - RNA, 37 nt, Artificial Sequence
  Description of Artificial Sequence:  Enzymatic Nucleic Acid
caucgcuggccgaaaggcgagugaggucuacucaguc

SEQ ID NO: 20267 - RNA, 37 nt, Artificial Sequence
  Description of Artificial Sequence:  Enzymatic Nucleic Acid
ggccaucggccgaaaggcgagugaggucuugcacuca

SEQ ID NO: 20268 - RNA, 37 nt, Artificial Sequence
  Description of Artificial Sequence:  Enzymatic Nucleic Acid
agaagagggccgaaaggcgagugaggucucaucgcug

SEQ ID NO: 20269 - RNA, 37 nt, Artificial Sequence
  Description of Artificial Sequence:  Enzymatic Nucleic Acid
gugucuuagccgaaaggcgagugaggucuagaagagg

SEQ ID NO: 20270 - RNA, 37 nt, Artificial Sequence
  Description of Artificial Sequence:  Enzymatic Nucleic Acid
uccgaucagccgaaaggcgagugaggucuuuuuggaa

SEQ ID NO: 20271 - RNA, 37 nt, Artificial Sequence
  Description of Artificial Sequence:  Enzymatic Nucleic Acid
cuuguagggccgaaaggcgagugaggucuuccagugu

SEQ ID NO: 20272 - RNA, 37 nt, Artificial Sequence
  Description of Artificial Sequence:  Enzymatic Nucleic Acid
uagaagcagccgaaaggcgagugaggucuuuguaggc

SEQ ID NO: 20273 - RNA, 37 nt, Artificial Sequence
  Description of Artificial Sequence:  Enzymatic Nucleic Acid
gguagaaggccgaaaggcgagugaggucuacuuguag

SEQ ID NO: 20274 - RNA, 37 nt, Artificial Sequence
  Description of Artificial Sequence:  Enzymatic Nucleic Acid
gaccgagggccgaaaggcgagugaggucucaagucag

SEQ ID NO: 20275 - RNA, 37 nt, Artificial Sequence
  Description of Artificial Sequence:  Enzymatic Nucleic Acid
auaaaugagccgaaaggcgagugaggucucgaggcca

SEQ ID NO: 20276 - RNA, 37 nt, Artificial Sequence
  Description of Artificial Sequence:  Enzymatic Nucleic Acid
aacauagagccgaaaggcgagugaggucuauaaauga

SEQ ID NO: 20277 - RNA, 37 nt, Artificial Sequence
  Description of Artificial Sequence:  Enzymatic Nucleic Acid
aucuugaagccgaaaggcgagugaggucuauagacau

SEQ ID NO: 20278 - RNA, 37 nt, Artificial Sequence
  Description of Artificial Sequence:  Enzymatic Nucleic Acid
aacagaaggccgaaaggcgagugaggucuaauaaaug

SEQ ID NO: 20279 - RNA, 37 nt, Artificial Sequence
  Description of Artificial Sequence:  Enzymatic Nucleic Acid
gucacuaagccgaaaggcgagugaggucuagaagcaa

SEQ ID NO: 20280 - RNA, 37 nt, Artificial Sequence
  Description of Artificial Sequence:  Enzymatic Nucleic Acid
guuggucagccgaaaggcgagugaggucuuaacagaa

SEQ ID NO: 20281 - RNA, 37 nt, Artificial Sequence
  Description of Artificial Sequence:  Enzymatic Nucleic Acid
guacacgagccgaaaggcgagugaggucuuccauguu

SEQ ID NO: 20282 - RNA, 37 nt, Artificial Sequence
  Description of Artificial Sequence:  Enzymatic Nucleic Acid
aauguacagccgaaaggcgagugaggucugacuccau

SEQ ID NO: 20283 - RNA, 37 nt, Artificial Sequence
  Description of Artificial Sequence:  Enzymatic Nucleic Acid
guaauguagccgaaaggcgagugaggucuacgacucc

SEQ ID NO: 20284 - RNA, 37 nt, Artificial Sequence
  Description of Artificial Sequence:  Enzymatic Nucleic Acid
aaucaccagccgaaaggcgagugaggucuaguuuugu

SEQ ID NO: 20285 - RNA, 37 nt, Artificial Sequence
  Description of Artificial Sequence:  Enzymatic Nucleic Acid
uggaaucagccgaaaggcgagugaggucucacaguuu

SEQ ID NO: 20286 - RNA, 37 nt, Artificial Sequence
  Description of Artificial Sequence:  Enzymatic Nucleic Acid
acccgagagccgaaaggcgagugaggucuauggaauc

SEQ ID NO: 20287 - RNA, 37 nt, Artificial Sequence
  Description of Artificial Sequence:  Enzymatic Nucleic Acid
gaaauggagccgaaaggcgagugaggucuccgagaca

SEQ ID NO: 20288 - RNA, 37 nt, Artificial Sequence
  Description of Artificial Sequence:  Enzymatic Nucleic Acid
aagugacagccgaaaggcgagugaggucuguugagau

SEQ ID NO: 20289 - RNA, 37 nt, Artificial Sequence
  Description of Artificial Sequence:  Enzymatic Nucleic Acid
caaagugagccgaaaggcgagugaggucuacguugag

SEQ ID NO: 20290 - RNA, 37 nt, Artificial Sequence
  Description of Artificial Sequence:  Enzymatic Nucleic Acid
aucuugcagccgaaaggcgagugaggucuaaagugac

SEQ ID NO: 20291 - RNA, 37 nt, Artificial Sequence
  Description of Artificial Sequence:  Enzymatic Nucleic Acid
guaucuuggccgaaaggcgagugaggucuacaaagug

SEQ ID NO: 20292 - RNA, 37 nt, Artificial Sequence
  Description of Artificial Sequence:  Enzymatic Nucleic Acid
aucaggaagccgaaaggcgagugaggucuaaaucucu

SEQ ID NO: 20293 - RNA, 37 nt, Artificial Sequence
  Description of Artificial Sequence:  Enzymatic Nucleic Acid
uucuguuagccgaaaggcgagugaggucucaucagga

SEQ ID NO: 20294 - RNA, 37 nt, Artificial Sequence
  Description of Artificial Sequence:  Enzymatic Nucleic Acid
ccuucuuggccgaaaggcgagugaggucuugucccag

SEQ ID NO: 20295 - RNA, 37 nt, Artificial Sequence
  Description of Artificial Sequence:  Enzymatic Nucleic Acid
uaguaaaggccgaaaggcgagugaggucuccuucuug

SEQ ID NO: 20296 - RNA, 37 nt, Artificial Sequence
  Description of Artificial Sequence:  Enzymatic Nucleic Acid
ucauguaggccgaaaggcgagugaggucuugggaaua

SEQ ID NO: 20297 - RNA, 37 nt, Artificial Sequence
  Description of Artificial Sequence:  Enzymatic Nucleic Acid
cagcauaggccgaaaggcgagugaggucuugaucaug

SEQ ID NO: 20298 - RNA, 37 nt, Artificial Sequence
  Description of Artificial Sequence:  Enzymatic Nucleic Acid
caugccaggccgaaaggcgagugaggucuauagcuga

SEQ ID NO: 20299 - RNA, 37 nt, Artificial Sequence
  Description of Artificial Sequence:  Enzymatic Nucleic Acid
agaccauggccgaaaggcgagugaggucucagcauag

SEQ ID NO: 20300 - RNA, 37 nt, Artificial Sequence
  Description of Artificial Sequence:  Enzymatic Nucleic Acid
acagaagagccgaaaggcgagugaggucucaugccag

SEQ ID NO: 20301 - RNA, 37 nt, Artificial Sequence
  Description of Artificial Sequence:  Enzymatic Nucleic Acid
uugcuucagccgaaaggcgagugaggucuagaagacc

SEQ ID NO: 20302 - RNA, 37 nt, Artificial Sequence
  Description of Artificial Sequence:  Enzymatic Nucleic Acid
aauuuuuggccgaaaggcgagugaggucuuucacaga

SEQ ID NO: 20303 - RNA, 37 nt, Artificial Sequence
  Description of Artificial Sequence:  Enzymatic Nucleic Acid
acugguaagccgaaaggcgagugaggucuuuucauca

SEQ ID NO: 20304 - RNA, 37 nt, Artificial Sequence
  Description of Artificial Sequence:  Enzymatic Nucleic Acid
auaauagagccgaaaggcgagugaggucuugguaacu

SEQ ID NO: 20305 - RNA, 37 nt, Artificial Sequence
  Description of Artificial Sequence:  Enzymatic Nucleic Acid
acuauguagccgaaaggcgagugaggucuauaauaga

SEQ ID NO: 20306 - RNA, 37 nt, Artificial Sequence
  Description of Artificial Sequence:  Enzymatic Nucleic Acid
aacgacaagccgaaaggcgagugaggucuuauguaca

SEQ ID NO: 20307 - RNA, 37 nt, Artificial Sequence
  Description of Artificial Sequence:  Enzymatic Nucleic Acid
uacaacgagccgaaaggcgagugaggucuaacuaugu

SEQ ID NO: 20308 - RNA, 37 nt, Artificial Sequence
  Description of Artificial Sequence:  Enzymatic Nucleic Acid
cccuacaagccgaaaggcgagugaggucugacaacua

SEQ ID NO: 20309 - RNA, 37 nt, Artificial Sequence
  Description of Artificial Sequence:  Enzymatic Nucleic Acid
auacccuagccgaaaggcgagugaggucuaacgacaa

SEQ ID NO: 20310 - RNA, 37 nt, Artificial Sequence
  Description of Artificial Sequence:  Enzymatic Nucleic Acid
auccuauagccgaaaggcgagugaggucuccuacaac

SEQ ID NO: 20311 - RNA, 37 nt, Artificial Sequence
  Description of Artificial Sequence:  Enzymatic Nucleic Acid
cagaaccagccgaaaggcgagugaggucuaucauaaa

SEQ ID NO: 20312 - RNA, 37 nt, Artificial Sequence
  Description of Artificial Sequence:  Enzymatic Nucleic Acid
acucagaagccgaaaggcgagugaggucucacaucau

SEQ ID NO: 20313 - RNA, 37 nt, Artificial Sequence
  Description of Artificial Sequence:  Enzymatic Nucleic Acid
gagacggagccgaaaggcgagugaggucuucagaacc

SEQ ID NO: 20314 - RNA, 37 nt, Artificial Sequence
  Description of Artificial Sequence:  Enzymatic Nucleic Acid
ccaugagagccgaaaggcgagugaggucuggacucag

SEQ ID NO: 20315 - RNA, 37 nt, Artificial Sequence
  Description of Artificial Sequence:  Enzymatic Nucleic Acid
uucuccaagccgaaaggcgagugaggucuagauaguu

SEQ ID NO: 20316 - RNA, 37 nt, Artificial Sequence
  Description of Artificial Sequence:  Enzymatic Nucleic Acid
aagacaaggccgaaaggcgagugaggucuuuuucucc

SEQ ID NO: 20317 - RNA, 37 nt, Artificial Sequence
  Description of Artificial Sequence:  Enzymatic Nucleic Acid
auuuaagagccgaaaggcgagugaggucuaagcuuuu

SEQ ID NO: 20318 - RNA, 37 nt, Artificial Sequence
  Description of Artificial Sequence:  Enzymatic Nucleic Acid
uugcuguagccgaaaggcgagugaggucuaauuuaag

SEQ ID NO: 20319 - RNA, 37 nt, Artificial Sequence
  Description of Artificial Sequence:  Enzymatic Nucleic Acid
aguucuuggccgaaaggcgagugaggucuuguacaau

SEQ ID NO: 20320 - RNA, 37 nt, Artificial Sequence
  Description of Artificial Sequence:  Enzymatic Nucleic Acid
aauccccagccgaaaggcgagugaggucuauuuaguu

SEQ ID NO: 20321 - RNA, 37 nt, Artificial Sequence
  Description of Artificial Sequence:  Enzymatic Nucleic Acid
ugcugauggccgaaaggcgagugaggucuuucgaaga

SEQ ID NO: 20322 - RNA, 37 nt, Artificial Sequence
  Description of Artificial Sequence:  Enzymatic Nucleic Acid
uucuuauggccgaaaggcgagugaggucuugaugcuu

SEQ ID NO: 20323 - RNA, 37 nt, Artificial Sequence
  Description of Artificial Sequence:  Enzymatic Nucleic Acid
ucgguuuagccgaaaggcgagugaggucuaaguuucu

SEQ ID NO: 20324 - RNA, 37 nt, Artificial Sequence
  Description of Artificial Sequence:  Enzymatic Nucleic Acid
cucccagagccgaaaggcgagugaggucuuggguuuu

SEQ ID NO: 20325 - RNA, 37 nt, Artificial Sequence
  Description of Artificial Sequence:  Enzymatic Nucleic Acid
ucaucucagccgaaaggcgagugaggucuucccagac

SEQ ID NO: 20326 - RNA, 37 nt, Artificial Sequence
  Description of Artificial Sequence:  Enzymatic Nucleic Acid
uuaagguggccgaaaggcgagugaggucuucaaaaau

SEQ ID NO: 20327 - RNA, 37 nt, Artificial Sequence
  Description of Artificial Sequence:  Enzymatic Nucleic Acid
ggguuacagccgaaaggcgagugaggucucaucuaua

SEQ ID NO: 20328 - RNA, 37 nt, Artificial Sequence
  Description of Artificial Sequence:  Enzymatic Nucleic Acid
ccggguuagccgaaaggcgagugaggucuaccaucua

SEQ ID NO: 20329 - RNA, 37 nt, Artificial Sequence
  Description of Artificial Sequence:  Enzymatic Nucleic Acid
cuuggucagccgaaaggcgagugaggucuuccggguu

SEQ ID NO: 20330 - RNA, 37 nt, Artificial Sequence
  Description of Artificial Sequence:  Enzymatic Nucleic Acid
cagguguagccgaaaggcgagugaggucuaauccuug

SEQ ID NO: 20331 - RNA, 37 nt, Artificial Sequence
  Description of Artificial Sequence:  Enzymatic Nucleic Acid
augcugcagccgaaaggcgagugaggucuagguguac

SEQ ID NO: 20332 - RNA, 37 nt, Artificial Sequence
  Description of Artificial Sequence:  Enzymatic Nucleic Acid
ggaugcuggccgaaaggcgagugaggucuacaggugu

SEQ ID NO: 20333 - RNA, 37 nt, Artificial Sequence
  Description of Artificial Sequence:  Enzymatic Nucleic Acid
acuggauggccgaaaggcgagugaggucuugcacagg

SEQ ID NO: 20334 - RNA, 37 nt, Artificial Sequence
  Description of Artificial Sequence:  Enzymatic Nucleic Acid
ucagcccagccgaaaggcgagugaggucuuggaugcu

SEQ ID NO: 20335 - RNA, 37 nt, Artificial Sequence
  Description of Artificial Sequence:  Enzymatic Nucleic Acid
gucaucaggccgaaaggcgagugaggucuccacugga

SEQ ID NO: 20336 - RNA, 37 nt, Artificial Sequence
  Description of Artificial Sequence:  Enzymatic Nucleic Acid
caaauguggccgaaaggcgagugaggucuuguucuuc

SEQ ID NO: 20337 - RNA, 37 nt, Artificial Sequence
  Description of Artificial Sequence:  Enzymatic Nucleic Acid
gacccugagccgaaaggcgagugaggucuaaaugugc

SEQ ID NO: 20338 - RNA, 37 nt, Artificial Sequence
  Description of Artificial Sequence:  Enzymatic Nucleic Acid
uucauggagccgaaaggcgagugaggucuccugacaa

SEQ ID NO: 20339 - RNA, 37 nt, Artificial Sequence
  Description of Artificial Sequence:  Enzymatic Nucleic Acid
aaaagcaagccgaaaggcgagugaggucuaaaagguu

SEQ ID NO: 20340 - RNA, 37 nt, Artificial Sequence
  Description of Artificial Sequence:  Enzymatic Nucleic Acid
uccaaaaggccgaaaggcgagugaggucuaacaaaag

SEQ ID NO: 20341 - RNA, 37 nt, Artificial Sequence
  Description of Artificial Sequence:  Enzymatic Nucleic Acid
ccaugccagccgaaaggcgagugaggucuuuccaaaa

SEQ ID NO: 20342 - RNA, 37 nt, Artificial Sequence
  Description of Artificial Sequence:  Enzymatic Nucleic Acid
auuccauggccgaaaggcgagugaggucucacuucca

SEQ ID NO: 20343 - RNA, 37 nt, Artificial Sequence
  Description of Artificial Sequence:  Enzymatic Nucleic Acid
ggcuuccagccgaaaggcgagugaggucucagagauu

SEQ ID NO: 20344 - RNA, 37 nt, Artificial Sequence
  Description of Artificial Sequence:  Enzymatic Nucleic Acid
caccgugggccgaaaggcgagugaggucuuuccacca

SEQ ID NO: 20345 - RNA, 37 nt, Artificial Sequence
  Description of Artificial Sequence:  Enzymatic Nucleic Acid
cucccccagccgaaaggcgagugaggucucguggcuu

SEQ ID NO: 20346 - RNA, 37 nt, Artificial Sequence
  Description of Artificial Sequence:  Enzymatic Nucleic Acid
cugacacggccgaaaggcgagugaggucuucccccac

SEQ ID NO: 20347 - RNA, 37 nt, Artificial Sequence
  Description of Artificial Sequence:  Enzymatic Nucleic Acid
uucugacagccgaaaggcgagugaggucugcuccccc

SEQ ID NO: 20348 - RNA, 37 nt, Artificial Sequence
  Description of Artificial Sequence:  Enzymatic Nucleic Acid
gauucugagccgaaaggcgagugaggucuacgcuccc

SEQ ID NO: 20349 - RNA, 37 nt, Artificial Sequence
  Description of Artificial Sequence:  Enzymatic Nucleic Acid
guacuucggccgaaaggcgagugaggucuagggauuc

SEQ ID NO: 20350 - RNA, 37 nt, Artificial Sequence
  Description of Artificial Sequence:  Enzymatic Nucleic Acid
ccaagguagccgaaaggcgagugaggucuuucgcagg

SEQ ID NO: 20351 - RNA, 37 nt, Artificial Sequence
  Description of Artificial Sequence:  Enzymatic Nucleic Acid
guggguaagccgaaaggcgagugaggucucaagguac

SEQ ID NO: 20352 - RNA, 37 nt, Artificial Sequence
  Description of Artificial Sequence:  Enzymatic Nucleic Acid
uuuuuauagccgaaaggcgagugaggucucauuuuau

SEQ ID NO: 20353 - RNA, 37 nt, Artificial Sequence
  Description of Artificial Sequence:  Enzymatic Nucleic Acid
ugauuggagccgaaaggcgagugaggucuucaagggg

SEQ ID NO: 20354 - RNA, 37 nt, Artificial Sequence
  Description of Artificial Sequence:  Enzymatic Nucleic Acid
augccccggccgaaaggcgagugaggucuuuuaauug

SEQ ID NO: 20355 - RNA, 37 nt, Artificial Sequence
  Description of Artificial Sequence:  Enzymatic Nucleic Acid
aguacauggccgaaaggcgagugaggucucccgcuuu

SEQ ID NO: 20356 - RNA, 37 nt, Artificial Sequence
  Description of Artificial Sequence:  Enzymatic Nucleic Acid
cgucaguagccgaaaggcgagugaggucuaugccccg

SEQ ID NO: 20357 - RNA, 37 nt, Artificial Sequence
  Description of Artificial Sequence:  Enzymatic Nucleic Acid
uucacucagccgaaaggcgagugaggucuuuccauaa

SEQ ID NO: 20358 - RNA, 37 nt, Artificial Sequence
  Description of Artificial Sequence:  Enzymatic Nucleic Acid
cucuuucagccgaaaggcgagugaggucuucacuucc

SEQ ID NO: 20359 - RNA, 37 nt, Artificial Sequence
  Description of Artificial Sequence:  Enzymatic Nucleic Acid
aaggaugagccgaaaggcgagugaggucuaguguaau

SEQ ID NO: 20360 - RNA, 37 nt, Artificial Sequence
  Description of Artificial Sequence:  Enzymatic Nucleic Acid
uggcucuggccgaaaggcgagugaggucuuucuccuu

SEQ ID NO: 20361 - RNA, 37 nt, Artificial Sequence
  Description of Artificial Sequence:  Enzymatic Nucleic Acid
ccacaugggccgaaaggcgagugaggucuucugcuuc

SEQ ID NO: 20362 - RNA, 37 nt, Artificial Sequence
  Description of Artificial Sequence:  Enzymatic Nucleic Acid
agagaccagccgaaaggcgagugaggucuauggcucu

SEQ ID NO: 20363 - RNA, 37 nt, Artificial Sequence
  Description of Artificial Sequence:  Enzymatic Nucleic Acid
cagagagagccgaaaggcgagugaggucucacauggc

SEQ ID NO: 20364 - RNA, 37 nt, Artificial Sequence
  Description of Artificial Sequence:  Enzymatic Nucleic Acid
auacacaagccgaaaggcgagugaggucucagagaga

SEQ ID NO: 20365 - RNA, 37 nt, Artificial Sequence
  Description of Artificial Sequence:  Enzymatic Nucleic Acid
gacauacagccgaaaggcgagugaggucuaaccagag

SEQ ID NO: 20366 - RNA, 37 nt, Artificial Sequence
  Description of Artificial Sequence:  Enzymatic Nucleic Acid
gggacauagccgaaaggcgagugaggucuacaaccag

SEQ ID NO: 20367 - RNA, 37 nt, Artificial Sequence
  Description of Artificial Sequence:  Enzymatic Nucleic Acid
gggugggagccgaaaggcgagugaggucuauacacaa

SEQ ID NO: 20368 - RNA, 37 nt, Artificial Sequence
  Description of Artificial Sequence:  Enzymatic Nucleic Acid
auuucucagccgaaaggcgagugaggucucaaucugg

SEQ ID NO: 20369 - RNA, 37 nt, Artificial Sequence
  Description of Artificial Sequence:  Enzymatic Nucleic Acid
ggaauccagccgaaaggcgagugaggucuaggagaga

SEQ ID NO: 20370 - RNA, 37 nt, Artificial Sequence
  Description of Artificial Sequence:  Enzymatic Nucleic Acid
gugccguagccgaaaggcgagugaggucuugguagga

SEQ ID NO: 20371 - RNA, 37 nt, Artificial Sequence
  Description of Artificial Sequence:  Enzymatic Nucleic Acid
gagugguggccgaaaggcgagugaggucucguacugg

SEQ ID NO: 20372 - RNA, 37 nt, Artificial Sequence
  Description of Artificial Sequence:  Enzymatic Nucleic Acid
caugucaggccgaaaggcgagugaggucuguuugagu

SEQ ID NO: 20373 - RNA, 37 nt, Artificial Sequence
  Description of Artificial Sequence:  Enzymatic Nucleic Acid
agaccguagccgaaaggcgagugaggucuaugucagc

SEQ ID NO: 20374 - RNA, 37 nt, Artificial Sequence
  Description of Artificial Sequence:  Enzymatic Nucleic Acid
ggcauagagccgaaaggcgagugaggucucguacaug

SEQ ID NO: 20375 - RNA, 37 nt, Artificial Sequence
  Description of Artificial Sequence:  Enzymatic Nucleic Acid
aggaaugggccgaaaggcgagugaggucuauagaccg

SEQ ID NO: 20376 - RNA, 37 nt, Artificial Sequence
  Description of Artificial Sequence:  Enzymatic Nucleic Acid
augugauggccgaaaggcgagugaggucugggggagg

SEQ ID NO: 20377 - RNA, 37 nt, Artificial Sequence
  Description of Artificial Sequence:  Enzymatic Nucleic Acid
ugccaauagccgaaaggcgagugaggucucaguggau

SEQ ID NO: 20378 - RNA, 37 nt, Artificial Sequence
  Description of Artificial Sequence:  Enzymatic Nucleic Acid
uccaacuggccgaaaggcgagugaggucucaauacca

SEQ ID NO: 20379 - RNA, 37 nt, Artificial Sequence
  Description of Artificial Sequence:  Enzymatic Nucleic Acid
uccuccaagccgaaaggcgagugaggucuugccaaua

SEQ ID NO: 20380 - RNA, 37 nt, Artificial Sequence
  Description of Artificial Sequence:  Enzymatic Nucleic Acid
uuggcgcagccgaaaggcgagugaggucuucuuccuc

SEQ ID NO: 20381 - RNA, 37 nt, Artificial Sequence
  Description of Artificial Sequence:  Enzymatic Nucleic Acid
cguuggcggccgaaaggcgagugaggucuacucuucc

SEQ ID NO: 20382 - RNA, 37 nt, Artificial Sequence
  Description of Artificial Sequence:  Enzymatic Nucleic Acid
cucguugggccgaaaggcgagugaggucugcacucuu

SEQ ID NO: 20383 - RNA, 37 nt, Artificial Sequence
  Description of Artificial Sequence:  Enzymatic Nucleic Acid
uggcuggggccgaaaggcgagugaggucuucguuggc

SEQ ID NO: 20384 - RNA, 37 nt, Artificial Sequence
  Description of Artificial Sequence:  Enzymatic Nucleic Acid
cagcuugggccgaaaggcgagugaggucuugggcucg

SEQ ID NO: 20385 - RNA, 37 nt, Artificial Sequence
  Description of Artificial Sequence:  Enzymatic Nucleic Acid
ugagacaggccgaaaggcgagugaggucuuuggcugg

SEQ ID NO: 20386 - RNA, 37 nt, Artificial Sequence
  Description of Artificial Sequence:  Enzymatic Nucleic Acid
cacugagagccgaaaggcgagugaggucuagcuuggc

SEQ ID NO: 20387 - RNA, 37 nt, Artificial Sequence
  Description of Artificial Sequence:  Enzymatic Nucleic Acid
guuugucagccgaaaggcgagugaggucuugagacag

SEQ ID NO: 20388 - RNA, 37 nt, Artificial Sequence
  Description of Artificial Sequence:  Enzymatic Nucleic Acid
auucuucagccgaaaggcgagugaggucuaaggguau

SEQ ID NO: 20389 - RNA, 37 nt, Artificial Sequence
  Description of Artificial Sequence:  Enzymatic Nucleic Acid
ccuccacagccgaaaggcgagugaggucuuucuccau

SEQ ID NO: 20390 - RNA, 37 nt, Artificial Sequence
  Description of Artificial Sequence:  Enzymatic Nucleic Acid
guccuccagccgaaaggcgagugaggucuacuucucc

SEQ ID NO: 20391 - RNA, 37 nt, Artificial Sequence
  Description of Artificial Sequence:  Enzymatic Nucleic Acid
uuuauuaagccgaaaggcgagugaggucuuucaauuu

SEQ ID NO: 20392 - RNA, 37 nt, Artificial Sequence
  Description of Artificial Sequence:  Enzymatic Nucleic Acid
aauuagaggccgaaaggcgagugaggucuaaauugau

SEQ ID NO: 20393 - RNA, 37 nt, Artificial Sequence
  Description of Artificial Sequence:  Enzymatic Nucleic Acid
gguacuuagccgaaaggcgagugaggucuaguuuugu

SEQ ID NO: 20394 - RNA, 37 nt, Artificial Sequence
  Description of Artificial Sequence:  Enzymatic Nucleic Acid
caaggguagccgaaaggcgagugaggucuuuacaguu

SEQ ID NO: 20395 - RNA, 37 nt, Artificial Sequence
  Description of Artificial Sequence:  Enzymatic Nucleic Acid
uuggauaagccgaaaggcgagugaggucuaaggguac

SEQ ID NO: 20396 - RNA, 37 nt, Artificial Sequence
  Description of Artificial Sequence:  Enzymatic Nucleic Acid
auuugccggccgaaaggcgagugaggucuuuggauaa

SEQ ID NO: 20397 - RNA, 37 nt, Artificial Sequence
  Description of Artificial Sequence:  Enzymatic Nucleic Acid
cacauuuggccgaaaggcgagugaggucucgcuugga

SEQ ID NO: 20398 - RNA, 37 nt, Artificial Sequence
  Description of Artificial Sequence:  Enzymatic Nucleic Acid
agcugacagccgaaaggcgagugaggucuauuugccg

SEQ ID NO: 20399 - RNA, 37 nt, Artificial Sequence
  Description of Artificial Sequence:  Enzymatic Nucleic Acid
aaagcugagccgaaaggcgagugaggucuacauuugc

SEQ ID NO: 20400 - RNA, 37 nt, Artificial Sequence
  Description of Artificial Sequence:  Enzymatic Nucleic Acid
guacaaaggccgaaaggcgagugaggucuugacacau

SEQ ID NO: 20401 - RNA, 37 nt, Artificial Sequence
  Description of Artificial Sequence:  Enzymatic Nucleic Acid
cauuuguagccgaaaggcgagugaggucuaaagcuga

SEQ ID NO: 20402 - RNA, 37 nt, Artificial Sequence
  Description of Artificial Sequence:  Enzymatic Nucleic Acid
ccgcuucagccgaaaggcgagugaggucuauuuguac

SEQ ID NO: 20403 - RNA, 37 nt, Artificial Sequence
  Description of Artificial Sequence:  Enzymatic Nucleic Acid
guugaccggccgaaaggcgagugaggucuuucacauu

SEQ ID NO: 20404 - RNA, 37 nt, Artificial Sequence
  Description of Artificial Sequence:  Enzymatic Nucleic Acid
uuuguugagccgaaaggcgagugaggucucgcuucac

SEQ ID NO: 20405 - RNA, 37 nt, Artificial Sequence
  Description of Artificial Sequence:  Enzymatic Nucleic Acid
ucucccgagccgaaaggcgagugaggucuuuuguuga

SEQ ID NO: 20406 - RNA, 37 nt, Artificial Sequence
  Description of Artificial Sequence:  Enzymatic Nucleic Acid
ggagaucagccgaaaggcgagugaggucuccucucuc

SEQ ID NO: 20407 - RNA, 37 nt, Artificial Sequence
  Description of Artificial Sequence:  Enzymatic Nucleic Acid
ccuggucagccgaaaggcgagugaggucuguggaagg

SEQ ID NO: 20408 - RNA, 37 nt, Artificial Sequence
  Description of Artificial Sequence:  Enzymatic Nucleic Acid
uuucaggagccgaaaggcgagugaggucucccugguc

SEQ ID NO: 20409 - RNA, 37 nt, Artificial Sequence
  Description of Artificial Sequence:  Enzymatic Nucleic Acid
ucagguuggccgaaaggcgagugaggucuaaaguaau

SEQ ID NO: 20410 - RNA, 37 nt, Artificial Sequence
  Description of Artificial Sequence:  Enzymatic Nucleic Acid
gugggcuggccgaaaggcgagugaggucuaugucagg

SEQ ID NO: 20411 - RNA, 37 nt, Artificial Sequence
  Description of Artificial Sequence:  Enzymatic Nucleic Acid
ucaguggggccgaaaggcgagugaggucuugcauguc

SEQ ID NO: 20412 - RNA, 37 nt, Artificial Sequence
  Description of Artificial Sequence:  Enzymatic Nucleic Acid
cucuccuggccgaaaggcgagugaggucuucaguggg

SEQ ID NO: 20413 - RNA, 37 nt, Artificial Sequence
  Description of Artificial Sequence:  Enzymatic Nucleic Acid
aagacacggccgaaaggcgagugaggucuucuccugc

SEQ ID NO: 20414 - RNA, 37 nt, Artificial Sequence
  Description of Artificial Sequence:  Enzymatic Nucleic Acid
caaagacagccgaaaggcgagugaggucugcucuccu

SEQ ID NO: 20415 - RNA, 37 nt, Artificial Sequence
  Description of Artificial Sequence:  Enzymatic Nucleic Acid
cacaaagagccgaaaggcgagugaggucuacgcucuc

SEQ ID NO: 20416 - RNA, 37 nt, Artificial Sequence
  Description of Artificial Sequence:  Enzymatic Nucleic Acid
gugcaccagccgaaaggcgagugaggucuaaagacac

SEQ ID NO: 20417 - RNA, 37 nt, Artificial Sequence
  Description of Artificial Sequence:  Enzymatic Nucleic Acid
gcagugcagccgaaaggcgagugaggucucacaaaga

SEQ ID NO: 20418 - RNA, 37 nt, Artificial Sequence
  Description of Artificial Sequence:  Enzymatic Nucleic Acid
cugcaguggccgaaaggcgagugaggucuaccacaaa

SEQ ID NO: 20419 - RNA, 37 nt, Artificial Sequence
  Description of Artificial Sequence:  Enzymatic Nucleic Acid
ucugucuggccgaaaggcgagugaggucuagugcacc

SEQ ID NO: 20420 - RNA, 37 nt, Artificial Sequence
  Description of Artificial Sequence:  Enzymatic Nucleic Acid
uucucaaagccgaaaggcgagugaggucuguagaucu

SEQ ID NO: 20421 - RNA, 37 nt, Artificial Sequence
  Description of Artificial Sequence:  Enzymatic Nucleic Acid
agcuuguagccgaaaggcgagugaggucucaugugag

SEQ ID NO: 20422 - RNA, 37 nt, Artificial Sequence
  Description of Artificial Sequence:  Enzymatic Nucleic Acid
gggccaaggccgaaaggcgagugaggucuuuguacca

SEQ ID NO: 20423 - RNA, 37 nt, Artificial Sequence
  Description of Artificial Sequence:  Enzymatic Nucleic Acid
gcuguggggccgaaaggcgagugaggucucaagcuug

SEQ ID NO: 20424 - RNA, 37 nt, Artificial Sequence
  Description of Artificial Sequence:  Enzymatic Nucleic Acid
ggcagagggccgaaaggcgagugaggucuugugggcc

SEQ ID NO: 20425 - RNA, 37 nt, Artificial Sequence
  Description of Artificial Sequence:  Enzymatic Nucleic Acid
uggauugggccgaaaggcgagugaggucuagaggcug

SEQ ID NO: 20426 - RNA, 37 nt, Artificial Sequence
  Description of Artificial Sequence:  Enzymatic Nucleic Acid
cucucccagccgaaaggcgagugaggucuauggauug

SEQ ID NO: 20427 - RNA, 37 nt, Artificial Sequence
  Description of Artificial Sequence:  Enzymatic Nucleic Acid
gugggcaagccgaaaggcgagugaggucuucucccac

SEQ ID NO: 20428 - RNA, 37 nt, Artificial Sequence
  Description of Artificial Sequence:  Enzymatic Nucleic Acid
gguguggggccgaaaggcgagugaggucuaacucucc

SEQ ID NO: 20429 - RNA, 37 nt, Artificial Sequence
  Description of Artificial Sequence:  Enzymatic Nucleic Acid
cuugcaaagccgaaaggcgagugaggucuaggugugg

SEQ ID NO: 20430 - RNA, 37 nt, Artificial Sequence
  Description of Artificial Sequence:  Enzymatic Nucleic Acid
aguucuuggccgaaaggcgagugaggucuaaacaggu

SEQ ID NO: 20431 - RNA, 37 nt, Artificial Sequence
  Description of Artificial Sequence:  Enzymatic Nucleic Acid
cauggugggccgaaaggcgagugaggucuauucaauu

SEQ ID NO: 20432 - RNA, 37 nt, Artificial Sequence
  Description of Artificial Sequence:  Enzymatic Nucleic Acid
uuagagaagccgaaaggcgagugaggucuaugguggc

SEQ ID NO: 20433 - RNA, 37 nt, Artificial Sequence
  Description of Artificial Sequence:  Enzymatic Nucleic Acid
cauuuguggccgaaaggcgagugaggucuuauuagag

SEQ ID NO: 20434 - RNA, 37 nt, Artificial Sequence
  Description of Artificial Sequence:  Enzymatic Nucleic Acid
uucuuaaggccgaaaggcgagugaggucuuccaugau

SEQ ID NO: 20435 - RNA, 37 nt, Artificial Sequence
  Description of Artificial Sequence:  Enzymatic Nucleic Acid
caaggauggccgaaaggcgagugaggucuauucuuaa

SEQ ID NO: 20436 - RNA, 37 nt, Artificial Sequence
  Description of Artificial Sequence:  Enzymatic Nucleic Acid
ugguccuggccgaaaggcgagugaggucuaaggaugc

SEQ ID NO: 20437 - RNA, 37 nt, Artificial Sequence
  Description of Artificial Sequence:  Enzymatic Nucleic Acid
aaggcagagccgaaaggcgagugaggucuauagucuc

SEQ ID NO: 20438 - RNA, 37 nt, Artificial Sequence
  Description of Artificial Sequence:  Enzymatic Nucleic Acid
gagcaagggccgaaaggcgagugaggucuagacauag

SEQ ID NO: 20439 - RNA, 37 nt, Artificial Sequence
  Description of Artificial Sequence:  Enzymatic Nucleic Acid
gucuugaggccgaaaggcgagugaggucuaaggcaga

SEQ ID NO: 20440 - RNA, 37 nt, Artificial Sequence
  Description of Artificial Sequence:  Enzymatic Nucleic Acid
ugaccacggccgaaaggcgagugaggucuaaugucuu

SEQ ID NO: 20441 - RNA, 37 nt, Artificial Sequence
  Description of Artificial Sequence:  Enzymatic Nucleic Acid
ccugaccagccgaaaggcgagugaggucugcaauguc

SEQ ID NO: 20442 - RNA, 37 nt, Artificial Sequence
  Description of Artificial Sequence:  Enzymatic Nucleic Acid
cugccugagccgaaaggcgagugaggucucacgcaau

SEQ ID NO: 20443 - RNA, 37 nt, Artificial Sequence
  Description of Artificial Sequence:  Enzymatic Nucleic Acid
gugagcuggccgaaaggcgagugaggucucugaccac

SEQ ID NO: 20444 - RNA, 37 nt, Artificial Sequence
  Description of Artificial Sequence:  Enzymatic Nucleic Acid
acugugaggccgaaaggcgagugaggucuugccugac

SEQ ID NO: 20445 - RNA, 37 nt, Artificial Sequence
  Description of Artificial Sequence:  Enzymatic Nucleic Acid
cucuaggagccgaaaggcgagugaggucuugugagcu

SEQ ID NO: 20446 - RNA, 37 nt, Artificial Sequence
  Description of Artificial Sequence:  Enzymatic Nucleic Acid
gccacacggccgaaaggcgagugaggucuucuaggac

SEQ ID NO: 20447 - RNA, 37 nt, Artificial Sequence
  Description of Artificial Sequence:  Enzymatic Nucleic Acid
gugccacagccgaaaggcgagugaggucugcucuagg

SEQ ID NO: 20448 - RNA, 37 nt, Artificial Sequence
  Description of Artificial Sequence:  Enzymatic Nucleic Acid
gggugccagccgaaaggcgagugaggucuacgcucua

SEQ ID NO: 20449 - RNA, 37 nt, Artificial Sequence
  Description of Artificial Sequence:  Enzymatic Nucleic Acid
cguggguggccgaaaggcgagugaggucucacacgcu

SEQ ID NO: 20450 - RNA, 37 nt, Artificial Sequence
  Description of Artificial Sequence:  Enzymatic Nucleic Acid
ccccaauagccgaaaggcgagugaggucuuugucguc

SEQ ID NO: 20451 - RNA, 37 nt, Artificial Sequence
  Description of Artificial Sequence:  Enzymatic Nucleic Acid
cuucgauggccgaaaggcgagugaggucuuuucccca

SEQ ID NO: 20452 - RNA, 37 nt, Artificial Sequence
  Description of Artificial Sequence:  Enzymatic Nucleic Acid
gcaugagagccgaaaggcgagugaggucuuucgaugc

SEQ ID NO: 20453 - RNA, 37 nt, Artificial Sequence
  Description of Artificial Sequence:  Enzymatic Nucleic Acid
augccguggccgaaaggcgagugaggucuaugagacu

SEQ ID NO: 20454 - RNA, 37 nt, Artificial Sequence
  Description of Artificial Sequence:  Enzymatic Nucleic Acid
cccagauggccgaaaggcgagugaggucucgugcaug

SEQ ID NO: 20455 - RNA, 37 nt, Artificial Sequence
  Description of Artificial Sequence:  Enzymatic Nucleic Acid
uuaaaccagccgaaaggcgagugaggucuaugaucug

SEQ ID NO: 20456 - RNA, 37 nt, Artificial Sequence
  Description of Artificial Sequence:  Enzymatic Nucleic Acid
ucuuuaaagccgaaaggcgagugaggucucacaugau

SEQ ID NO: 20457 - RNA, 37 nt, Artificial Sequence
  Description of Artificial Sequence:  Enzymatic Nucleic Acid
gucuucuagccgaaaggcgagugaggucuaagggucu

SEQ ID NO: 20458 - RNA, 37 nt, Artificial Sequence
  Description of Artificial Sequence:  Enzymatic Nucleic Acid
auacaauggccgaaaggcgagugaggucucugagucu

SEQ ID NO: 20459 - RNA, 37 nt, Artificial Sequence
  Description of Artificial Sequence:  Enzymatic Nucleic Acid
cuucaauagccgaaaggcgagugaggucuaaugccug

SEQ ID NO: 20460 - RNA, 37 nt, Artificial Sequence
  Description of Artificial Sequence:  Enzymatic Nucleic Acid
ucacucuggccgaaaggcgagugaggucuggauagug

SEQ ID NO: 20461 - RNA, 37 nt, Artificial Sequence
  Description of Artificial Sequence:  Enzymatic Nucleic Acid
cuuccucagccgaaaggcgagugaggucuucugcgga

SEQ ID NO: 20462 - RNA, 37 nt, Artificial Sequence
  Description of Artificial Sequence:  Enzymatic Nucleic Acid
uguagagggccgaaaggcgagugaggucucuucgucc

SEQ ID NO: 20463 - RNA, 37 nt, Artificial Sequence
  Description of Artificial Sequence:  Enzymatic Nucleic Acid
augccugggccgaaaggcgagugaggucuagguguag

SEQ ID NO: 20464 - RNA, 37 nt, Artificial Sequence
  Description of Artificial Sequence:  Enzymatic Nucleic Acid
acugcauggccgaaaggcgagugaggucucuggcagg

SEQ ID NO: 20465 - RNA, 37 nt, Artificial Sequence
  Description of Artificial Sequence:  Enzymatic Nucleic Acid
gaacacuggccgaaaggcgagugaggucuaugccugg

SEQ ID NO: 20466 - RNA, 37 nt, Artificial Sequence
  Description of Artificial Sequence:  Enzymatic Nucleic Acid
caagaacagccgaaaggcgagugaggucuugcaugcc

SEQ ID NO: 20467 - RNA, 37 nt, Artificial Sequence
  Description of Artificial Sequence:  Enzymatic Nucleic Acid
gccaagaagccgaaaggcgagugaggucuacugcaug

SEQ ID NO: 20468 - RNA, 37 nt, Artificial Sequence
  Description of Artificial Sequence:  Enzymatic Nucleic Acid
uugcacaggccgaaaggcgagugaggucucaagaaca

SEQ ID NO: 20469 - RNA, 37 nt, Artificial Sequence
  Description of Artificial Sequence:  Enzymatic Nucleic Acid
cuuuugcagccgaaaggcgagugaggucuagccaaga

SEQ ID NO: 20470 - RNA, 37 nt, Artificial Sequence
  Description of Artificial Sequence:  Enzymatic Nucleic Acid
cacuuuuggccgaaaggcgagugaggucuacagccaa

SEQ ID NO: 20471 - RNA, 37 nt, Artificial Sequence
  Description of Artificial Sequence:  Enzymatic Nucleic Acid
ugccuccagccgaaaggcgagugaggucuuuuugcac

SEQ ID NO: 20472 - RNA, 37 nt, Artificial Sequence
  Description of Artificial Sequence:  Enzymatic Nucleic Acid
gaaaaauggccgaaaggcgagugaggucucuccacuu

SEQ ID NO: 20473 - RNA, 37 nt, Artificial Sequence
  Description of Artificial Sequence:  Enzymatic Nucleic Acid
ccugggcagccgaaaggcgagugaggucucuucuauu

SEQ ID NO: 20474 - RNA, 37 nt, Artificial Sequence
  Description of Artificial Sequence:  Enzymatic Nucleic Acid
uuccuggggccgaaaggcgagugaggucuaccuucua

SEQ ID NO: 20475 - RNA, 37 nt, Artificial Sequence
  Description of Artificial Sequence:  Enzymatic Nucleic Acid
cgugccuagccgaaaggcgagugaggucuuagaauaa

SEQ ID NO: 20476 - RNA, 37 nt, Artificial Sequence
  Description of Artificial Sequence:  Enzymatic Nucleic Acid
ccgccguggccgaaaggcgagugaggucucuacuaga

SEQ ID NO: 20477 - RNA, 37 nt, Artificial Sequence
  Description of Artificial Sequence:  Enzymatic Nucleic Acid
aaucaccggccgaaaggcgagugaggucucgugccua

SEQ ID NO: 20478 - RNA, 37 nt, Artificial Sequence
  Description of Artificial Sequence:  Enzymatic Nucleic Acid
ggcaaucagccgaaaggcgagugaggucucgccgugc

SEQ ID NO: 20479 - RNA, 37 nt, Artificial Sequence
  Description of Artificial Sequence:  Enzymatic Nucleic Acid
gaacaugggccgaaaggcgagugaggucuaaucaccg

SEQ ID NO: 20480 - RNA, 37 nt, Artificial Sequence
  Description of Artificial Sequence:  Enzymatic Nucleic Acid
cagaagaagccgaaaggcgagugaggucuauggcaau

SEQ ID NO: 20481 - RNA, 37 nt, Artificial Sequence
  Description of Artificial Sequence:  Enzymatic Nucleic Acid
agaaguaggccgaaaggcgagugaggucucagaagaa

SEQ ID NO: 20482 - RNA, 37 nt, Artificial Sequence
  Description of Artificial Sequence:  Enzymatic Nucleic Acid
gaugaugagccgaaaggcgagugaggucuaagaagua

SEQ ID NO: 20483 - RNA, 37 nt, Artificial Sequence
  Description of Artificial Sequence:  Enzymatic Nucleic Acid
ccgcuuaagccgaaaggcgagugaggucugguccgua

SEQ ID NO: 20484 - RNA, 37 nt, Artificial Sequence
  Description of Artificial Sequence:  Enzymatic Nucleic Acid
uuggcccggccgaaaggcgagugaggucuuuaacggu

SEQ ID NO: 20485 - RNA, 37 nt, Artificial Sequence
  Description of Artificial Sequence:  Enzymatic Nucleic Acid
uccauugggccgaaaggcgagugaggucuccgcuuaa

SEQ ID NO: 20486 - RNA, 37 nt, Artificial Sequence
  Description of Artificial Sequence:  Enzymatic Nucleic Acid
acaaguaggccgaaaggcgagugaggucucugucuuc

SEQ ID NO: 20487 - RNA, 37 nt, Artificial Sequence
  Description of Artificial Sequence:  Enzymatic Nucleic Acid
acgauggagccgaaaggcgagugaggucuaaguagcc

SEQ ID NO: 20488 - RNA, 37 nt, Artificial Sequence
  Description of Artificial Sequence:  Enzymatic Nucleic Acid
auccaugagccgaaaggcgagugaggucugauggaca

SEQ ID NO: 20489 - RNA, 37 nt, Artificial Sequence
  Description of Artificial Sequence:  Enzymatic Nucleic Acid
gucguucagccgaaaggcgagugaggucuaauguuca

SEQ ID NO: 20490 - RNA, 37 nt, Artificial Sequence
  Description of Artificial Sequence:  Enzymatic Nucleic Acid
ucauaagggccgaaaggcgagugaggucuagucguuc

SEQ ID NO: 20491 - RNA, 37 nt, Artificial Sequence
  Description of Artificial Sequence:  Enzymatic Nucleic Acid
uuugcugggccgaaaggcgagugaggucuaucauaag

SEQ ID NO: 20492 - RNA, 37 nt, Artificial Sequence
  Description of Artificial Sequence:  Enzymatic Nucleic Acid
cccauuuggccgaaaggcgagugaggucuuggcauca

SEQ ID NO: 20493 - RNA, 37 nt, Artificial Sequence
  Description of Artificial Sequence:  Enzymatic Nucleic Acid
agcuucaggccgaaaggcgagugaggucucggucucu

SEQ ID NO: 20494 - RNA, 37 nt, Artificial Sequence
  Description of Artificial Sequence:  Enzymatic Nucleic Acid
uuaccuaggccgaaaggcgagugaggucuuucagccg

SEQ ID NO: 20495 - RNA, 37 nt, Artificial Sequence
  Description of Artificial Sequence:  Enzymatic Nucleic Acid
gaggcuuagccgaaaggcgagugaggucucuagcuuc

SEQ ID NO: 20496 - RNA, 37 nt, Artificial Sequence
  Description of Artificial Sequence:  Enzymatic Nucleic Acid
ccaagagggccgaaaggcgagugaggucuuuaccuag

SEQ ID NO: 20497 - RNA, 37 nt, Artificial Sequence
  Description of Artificial Sequence:  Enzymatic Nucleic Acid
caccacgggccgaaaggcgagugaggucucaagaggc

SEQ ID NO: 20498 - RNA, 37 nt, Artificial Sequence
  Description of Artificial Sequence:  Enzymatic Nucleic Acid
aggcaccagccgaaaggcgagugaggucuggccaaga

SEQ ID NO: 20499 - RNA, 37 nt, Artificial Sequence
  Description of Artificial Sequence:  Enzymatic Nucleic Acid
caaaggcagccgaaaggcgagugaggucucacggcca

SEQ ID NO: 20500 - RNA, 37 nt, Artificial Sequence
  Description of Artificial Sequence:  Enzymatic Nucleic Acid
gccaaagggccgaaaggcgagugaggucuaccacggc

SEQ ID NO: 20501 - RNA, 37 nt, Artificial Sequence
  Description of Artificial Sequence:  Enzymatic Nucleic Acid
ucacuugggccgaaaggcgagugaggucucaaaggca

SEQ ID NO: 20502 - RNA, 37 nt, Artificial Sequence
  Description of Artificial Sequence:  Enzymatic Nucleic Acid
uucaaucagccgaaaggcgagugaggucuuuggccaa

SEQ ID NO: 20503 - RNA, 37 nt, Artificial Sequence
  Description of Artificial Sequence:  Enzymatic Nucleic Acid
ggcaucuggccgaaaggcgagugaggucuuucaauca

SEQ ID NO: 20504 - RNA, 37 nt, Artificial Sequence
  Description of Artificial Sequence:  Enzymatic Nucleic Acid
uccaaagggccgaaaggcgagugaggucuaucugcuu

SEQ ID NO: 20505 - RNA, 37 nt, Artificial Sequence
  Description of Artificial Sequence:  Enzymatic Nucleic Acid
gcaaguuggccgaaaggcgagugaggucuugucuugu

SEQ ID NO: 20506 - RNA, 37 nt, Artificial Sequence
  Description of Artificial Sequence:  Enzymatic Nucleic Acid
cuguccuggccgaaaggcgagugaggucuaaguugcu

SEQ ID NO: 20507 - RNA, 37 nt, Artificial Sequence
  Description of Artificial Sequence:  Enzymatic Nucleic Acid
gacugcuagccgaaaggcgagugaggucuuguccugc

SEQ ID NO: 20508 - RNA, 37 nt, Artificial Sequence
  Description of Artificial Sequence:  Enzymatic Nucleic Acid
uuugacuggccgaaaggcgagugaggucuuacugucc

SEQ ID NO: 20509 - RNA, 37 nt, Artificial Sequence
  Description of Artificial Sequence:  Enzymatic Nucleic Acid
cauuuugagccgaaaggcgagugaggucuugcuacug

SEQ ID NO: 20510 - RNA, 37 nt, Artificial Sequence
  Description of Artificial Sequence:  Enzymatic Nucleic Acid
ucuuucaagccgaaaggcgagugaggucuauuuugac

SEQ ID NO: 20511 - RNA, 37 nt, Artificial Sequence
  Description of Artificial Sequence:  Enzymatic Nucleic Acid
guguguuggccgaaaggcgagugaggucuuccuucuu

SEQ ID NO: 20512 - RNA, 37 nt, Artificial Sequence
  Description of Artificial Sequence:  Enzymatic Nucleic Acid
gaugcucagccgaaaggcgagugaggucuuguguguu

SEQ ID NO: 20513 - RNA, 37 nt, Artificial Sequence
  Description of Artificial Sequence:  Enzymatic Nucleic Acid
gcucgauggccgaaaggcgagugaggucuucacugug

SEQ ID NO: 20514 - RNA, 37 nt, Artificial Sequence
  Description of Artificial Sequence:  Enzymatic Nucleic Acid
caugagaggccgaaaggcgagugaggucuucgaugcu

SEQ ID NO: 20515 - RNA, 37 nt, Artificial Sequence
  Description of Artificial Sequence:  Enzymatic Nucleic Acid
aguucagagccgaaaggcgagugaggucuaugagagc

SEQ ID NO: 20516 - RNA, 37 nt, Artificial Sequence
  Description of Artificial Sequence:  Enzymatic Nucleic Acid
gauggugagccgaaaggcgagugaggucucaauauga

SEQ ID NO: 20517 - RNA, 37 nt, Artificial Sequence
  Description of Artificial Sequence:  Enzymatic Nucleic Acid
guugaccagccgaaaggcgagugaggucuauugagau

SEQ ID NO: 20518 - RNA, 37 nt, Artificial Sequence
  Description of Artificial Sequence:  Enzymatic Nucleic Acid
aagguugagccgaaaggcgagugaggucucacauuga

SEQ ID NO: 20519 - RNA, 37 nt, Artificial Sequence
  Description of Artificial Sequence:  Enzymatic Nucleic Acid
uacaggcagccgaaaggcgagugaggucucuagaagg

SEQ ID NO: 20520 - RNA, 37 nt, Artificial Sequence
  Description of Artificial Sequence:  Enzymatic Nucleic Acid
gguacagggccgaaaggcgagugaggucuaccuagaa

SEQ ID NO: 20521 - RNA, 37 nt, Artificial Sequence
  Description of Artificial Sequence:  Enzymatic Nucleic Acid
gcuugguagccgaaaggcgagugaggucuaggcaccu

SEQ ID NO: 20522 - RNA, 37 nt, Artificial Sequence
  Description of Artificial Sequence:  Enzymatic Nucleic Acid
ccuccugggccgaaaggcgagugaggucuuugguaca

SEQ ID NO: 20523 - RNA, 37 nt, Artificial Sequence
  Description of Artificial Sequence:  Enzymatic Nucleic Acid
augagugggccgaaaggcgagugaggucuccuccugg

SEQ ID NO: 20524 - RNA, 37 nt, Artificial Sequence
  Description of Artificial Sequence:  Enzymatic Nucleic Acid
cacaaucagccgaaaggcgagugaggucucaugagug

SEQ ID NO: 20525 - RNA, 37 nt, Artificial Sequence
  Description of Artificial Sequence:  Enzymatic Nucleic Acid
gaauuccagccgaaaggcgagugaggucuaaucacca

SEQ ID NO: 20526 - RNA, 37 nt, Artificial Sequence
  Description of Artificial Sequence:  Enzymatic Nucleic Acid
caaauuuggccgaaaggcgagugaggucuagaauucc

SEQ ID NO: 20527 - RNA, 37 nt, Artificial Sequence
  Description of Artificial Sequence:  Enzymatic Nucleic Acid
uaaguggagccgaaaggcgagugaggucuagguuucc

SEQ ID NO: 20528 - RNA, 37 nt, Artificial Sequence
  Description of Artificial Sequence:  Enzymatic Nucleic Acid
uucucuuggccgaaaggcgagugaggucuuccucagg

SEQ ID NO: 20529 - RNA, 37 nt, Artificial Sequence
  Description of Artificial Sequence:  Enzymatic Nucleic Acid
guaggggagccgaaaggcgagugaggucuaaauucau

SEQ ID NO: 20530 - RNA, 37 nt, Artificial Sequence
  Description of Artificial Sequence:  Enzymatic Nucleic Acid
gaaucguggccgaaaggcgagugaggucucccuuugg

SEQ ID NO: 20531 - RNA, 37 nt, Artificial Sequence
  Description of Artificial Sequence:  Enzymatic Nucleic Acid
ucccuugagccgaaaggcgagugaggucuggaaucgu

SEQ ID NO: 20532 - RNA, 37 nt, Artificial Sequence
  Description of Artificial Sequence:  Enzymatic Nucleic Acid
ugcuccaagccgaaaggcgagugaggucuguagucuu

SEQ ID NO: 20533 - RNA, 37 nt, Artificial Sequence
  Description of Artificial Sequence:  Enzymatic Nucleic Acid
agggauuggccgaaaggcgagugaggucuuccaacgu

SEQ ID NO: 20534 - RNA, 37 nt, Artificial Sequence
  Description of Artificial Sequence:  Enzymatic Nucleic Acid
cagauccagccgaaaggcgagugaggucuagggauug

SEQ ID NO: 20535 - RNA, 37 nt, Artificial Sequence
  Description of Artificial Sequence:  Enzymatic Nucleic Acid
uccaagcggccgaaaggcgagugaggucucguuucag

SEQ ID NO: 20536 - RNA, 37 nt, Artificial Sequence
  Description of Artificial Sequence:  Enzymatic Nucleic Acid
uguccaaggccgaaaggcgagugaggucugccguuuc

SEQ ID NO: 20537 - RNA, 37 nt, Artificial Sequence
  Description of Artificial Sequence:  Enzymatic Nucleic Acid
uggugauggccgaaaggcgagugaggucuuguccaag

SEQ ID NO: 20538 - RNA, 37 nt, Artificial Sequence
  Description of Artificial Sequence:  Enzymatic Nucleic Acid
ucuggcuagccgaaaggcgagugaggucuuggugaug

SEQ ID NO: 20539 - RNA, 37 nt, Artificial Sequence
  Description of Artificial Sequence:  Enzymatic Nucleic Acid
agcucugggccgaaaggcgagugaggucuuacuggug

SEQ ID NO: 20540 - RNA, 37 nt, Artificial Sequence
  Description of Artificial Sequence:  Enzymatic Nucleic Acid
uggcugaggccgaaaggcgagugaggucuucuggcua

SEQ ID NO: 20541 - RNA, 37 nt, Artificial Sequence
  Description of Artificial Sequence:  Enzymatic Nucleic Acid
agagcugggccgaaaggcgagugaggucuugagcucu

SEQ ID NO: 20542 - RNA, 37 nt, Artificial Sequence
  Description of Artificial Sequence:  Enzymatic Nucleic Acid
auccagaggccgaaaggcgagugaggucuuggcugag

SEQ ID NO: 20543 - RNA, 37 nt, Artificial Sequence
  Description of Artificial Sequence:  Enzymatic Nucleic Acid
cuccuccagccgaaaggcgagugaggucuaaauccag

SEQ ID NO: 20544 - RNA, 37 nt, Artificial Sequence
  Description of Artificial Sequence:  Enzymatic Nucleic Acid
cugagggagccgaaaggcgagugaggucuuucuccuc

SEQ ID NO: 20545 - RNA, 37 nt, Artificial Sequence
  Description of Artificial Sequence:  Enzymatic Nucleic Acid
cuacaucagccgaaaggcgagugaggucuugagggac

SEQ ID NO: 20546 - RNA, 37 nt, Artificial Sequence
  Description of Artificial Sequence:  Enzymatic Nucleic Acid
uucuucuagccgaaaggcgagugaggucuaucacuga

SEQ ID NO: 20547 - RNA, 37 nt, Artificial Sequence
  Description of Artificial Sequence:  Enzymatic Nucleic Acid
uucaggaggccgaaaggcgagugaggucuuuccucuu

SEQ ID NO: 20548 - RNA, 37 nt, Artificial Sequence
  Description of Artificial Sequence:  Enzymatic Nucleic Acid
uccuuauagccgaaaggcgagugaggucuagaucuuc

SEQ ID NO: 20549 - RNA, 37 nt, Artificial Sequence
  Description of Artificial Sequence:  Enzymatic Nucleic Acid
augagauggccgaaaggcgagugaggucuuccaaggu

SEQ ID NO: 20550 - RNA, 37 nt, Artificial Sequence
  Description of Artificial Sequence:  Enzymatic Nucleic Acid
agcuguaagccgaaaggcgagugaggucuagaugaga

SEQ ID NO: 20551 - RNA, 37 nt, Artificial Sequence
  Description of Artificial Sequence:  Enzymatic Nucleic Acid
cuuggaaggccgaaaggcgagugaggucuuguaacag

SEQ ID NO: 20552 - RNA, 37 nt, Artificial Sequence
  Description of Artificial Sequence:  Enzymatic Nucleic Acid
cuuagccagccgaaaggcgagugaggucuuuggaagc

SEQ ID NO: 20553 - RNA, 37 nt, Artificial Sequence
  Description of Artificial Sequence:  Enzymatic Nucleic Acid
gcccuuaggccgaaaggcgagugaggucucacuugga

SEQ ID NO: 20554 - RNA, 37 nt, Artificial Sequence
  Description of Artificial Sequence:  Enzymatic Nucleic Acid
acuccauggccgaaaggcgagugaggucuccuuagcc

SEQ ID NO: 20555 - RNA, 37 nt, Artificial Sequence
  Description of Artificial Sequence:  Enzymatic Nucleic Acid
gccaagaagccgaaaggcgagugaggucuuccaugcc

SEQ ID NO: 20556 - RNA, 37 nt, Artificial Sequence
  Description of Artificial Sequence:  Enzymatic Nucleic Acid
ucgcgauggccgaaaggcgagugaggucucaagaacu

SEQ ID NO: 20557 - RNA, 37 nt, Artificial Sequence
  Description of Artificial Sequence:  Enzymatic Nucleic Acid
cacuuucggccgaaaggcgagugaggucugaugccaa

SEQ ID NO: 20558 - RNA, 37 nt, Artificial Sequence
  Description of Artificial Sequence:  Enzymatic Nucleic Acid
uggauacagccgaaaggcgagugaggucuuuucgcga

SEQ ID NO: 20559 - RNA, 37 nt, Artificial Sequence
  Description of Artificial Sequence:  Enzymatic Nucleic Acid
uguggauagccgaaaggcgagugaggucuacuuucgc

SEQ ID NO: 20560 - RNA, 37 nt, Artificial Sequence
  Description of Artificial Sequence:  Enzymatic Nucleic Acid
ucgugccggccgaaaggcgagugaggucucagguccc

SEQ ID NO: 20561 - RNA, 37 nt, Artificial Sequence
  Description of Artificial Sequence:  Enzymatic Nucleic Acid
auuucguggccgaaaggcgagugaggucucgccaggu

SEQ ID NO: 20562 - RNA, 37 nt, Artificial Sequence
  Description of Artificial Sequence:  Enzymatic Nucleic Acid
uuuaaccagccgaaaggcgagugaggucuguucuucu

SEQ ID NO: 20563 - RNA, 37 nt, Artificial Sequence
  Description of Artificial Sequence:  Enzymatic Nucleic Acid
gauuuuaagccgaaaggcgagugaggucucacguucu

SEQ ID NO: 20564 - RNA, 37 nt, Artificial Sequence
  Description of Artificial Sequence:  Enzymatic Nucleic Acid
caaagucagccgaaaggcgagugaggucuagauuuua

SEQ ID NO: 20565 - RNA, 37 nt, Artificial Sequence
  Description of Artificial Sequence:  Enzymatic Nucleic Acid
gggccaaggccgaaaggcgagugaggucucaaaguca

SEQ ID NO: 20566 - RNA, 37 nt, Artificial Sequence
  Description of Artificial Sequence:  Enzymatic Nucleic Acid
aucccggggccgaaaggcgagugaggucucaagccaa

SEQ ID NO: 20567 - RNA, 37 nt, Artificial Sequence
  Description of Artificial Sequence:  Enzymatic Nucleic Acid
uuuucugagccgaaaggcgagugaggucuauaaucug

SEQ ID NO: 20568 - RNA, 37 nt, Artificial Sequence
  Description of Artificial Sequence:  Enzymatic Nucleic Acid
gaggcgaggccgaaaggcgagugaggucuaucuccuu

SEQ ID NO: 20569 - RNA, 37 nt, Artificial Sequence
  Description of Artificial Sequence:  Enzymatic Nucleic Acid
aagggagggccgaaaggcgagugaggucugagcaucu

SEQ ID NO: 20570 - RNA, 37 nt, Artificial Sequence
  Description of Artificial Sequence:  Enzymatic Nucleic Acid
uucugggggccgaaaggcgagugaggucucauccauu

SEQ ID NO: 20571 - RNA, 37 nt, Artificial Sequence
  Description of Artificial Sequence:  Enzymatic Nucleic Acid
uguguacagccgaaaggcgagugaggucuucugucaa

SEQ ID NO: 20572 - RNA, 37 nt, Artificial Sequence
  Description of Artificial Sequence:  Enzymatic Nucleic Acid
auuguguagccgaaaggcgagugaggucuacucuguc

SEQ ID NO: 20573 - RNA, 37 nt, Artificial Sequence
  Description of Artificial Sequence:  Enzymatic Nucleic Acid
agacgucagccgaaaggcgagugaggucuucuggauu

SEQ ID NO: 20574 - RNA, 37 nt, Artificial Sequence
  Description of Artificial Sequence:  Enzymatic Nucleic Acid
agaccagagccgaaaggcgagugaggucugucacucu

SEQ ID NO: 20575 - RNA, 37 nt, Artificial Sequence
  Description of Artificial Sequence:  Enzymatic Nucleic Acid
ccaaaagagccgaaaggcgagugaggucucagacguc

SEQ ID NO: 20576 - RNA, 37 nt, Artificial Sequence
  Description of Artificial Sequence:  Enzymatic Nucleic Acid
gcaaaacagccgaaaggcgagugaggucucaaaagac

SEQ ID NO: 20577 - RNA, 37 nt, Artificial Sequence
  Description of Artificial Sequence:  Enzymatic Nucleic Acid
cagcaaaagccgaaaggcgagugaggucuaccaaaag

SEQ ID NO: 20578 - RNA, 37 nt, Artificial Sequence
  Description of Artificial Sequence:  Enzymatic Nucleic Acid
ucccacaggccgaaaggcgagugaggucuaaaacacc

SEQ ID NO: 20579 - RNA, 37 nt, Artificial Sequence
  Description of Artificial Sequence:  Enzymatic Nucleic Acid
auuucccagccgaaaggcgagugaggucuagcaaaac

SEQ ID NO: 20580 - RNA, 37 nt, Artificial Sequence
  Description of Artificial Sequence:  Enzymatic Nucleic Acid
gagaagcagccgaaaggcgagugaggucucuaaggaa

SEQ ID NO: 20581 - RNA, 37 nt, Artificial Sequence
  Description of Artificial Sequence:  Enzymatic Nucleic Acid
uggagaaggccgaaaggcgagugaggucuaccuaagg

SEQ ID NO: 20582 - RNA, 37 nt, Artificial Sequence
  Description of Artificial Sequence:  Enzymatic Nucleic Acid
aaucuuuagccgaaaggcgagugaggucucccaggau

SEQ ID NO: 20583 - RNA, 37 nt, Artificial Sequence
  Description of Artificial Sequence:  Enzymatic Nucleic Acid
aucgccuagccgaaaggcgagugaggucuaaaauucu

SEQ ID NO: 20584 - RNA, 37 nt, Artificial Sequence
  Description of Artificial Sequence:  Enzymatic Nucleic Acid
uucaaucggccgaaaggcgagugaggucucuacaaaa

SEQ ID NO: 20585 - RNA, 37 nt, Artificial Sequence
  Description of Artificial Sequence:  Enzymatic Nucleic Acid
aucagggggccgaaaggcgagugaggucuccucauuc

SEQ ID NO: 20586 - RNA, 37 nt, Artificial Sequence
  Description of Artificial Sequence:  Enzymatic Nucleic Acid
gucugguagccgaaaggcgagugaggucuauuucugg

SEQ ID NO: 20587 - RNA, 37 nt, Artificial Sequence
  Description of Artificial Sequence:  Enzymatic Nucleic Acid
caguccaggccgaaaggcgagugaggucuauggucug

SEQ ID NO: 20588 - RNA, 37 nt, Artificial Sequence
  Description of Artificial Sequence:  Enzymatic Nucleic Acid
cgugccaggccgaaaggcgagugaggucuaguccagc

SEQ ID NO: 20589 - RNA, 37 nt, Artificial Sequence
  Description of Artificial Sequence:  Enzymatic Nucleic Acid
uccccguggccgaaaggcgagugaggucucagcaguc

SEQ ID NO: 20590 - RNA, 37 nt, Artificial Sequence
  Description of Artificial Sequence:  Enzymatic Nucleic Acid
ugacuggggccgaaaggcgagugaggucuuccccgug

SEQ ID NO: 20591 - RNA, 37 nt, Artificial Sequence
  Description of Artificial Sequence:  Enzymatic Nucleic Acid
gucucugagccgaaaggcgagugaggucuugggcucc

SEQ ID NO: 20592 - RNA, 37 nt, Artificial Sequence
  Description of Artificial Sequence:  Enzymatic Nucleic Acid
ucugaaaagccgaaaggcgagugaggucugugggucu

SEQ ID NO: 20593 - RNA, 37 nt, Artificial Sequence
  Description of Artificial Sequence:  Enzymatic Nucleic Acid
uccaccaagccgaaaggcgagugaggucuucugaaaa

SEQ ID NO: 20594 - RNA, 37 nt, Artificial Sequence
  Description of Artificial Sequence:  Enzymatic Nucleic Acid
auguuccagccgaaaggcgagugaggucucaacucug

SEQ ID NO: 20595 - RNA, 37 nt, Artificial Sequence
  Description of Artificial Sequence:  Enzymatic Nucleic Acid
uuagcuuggccgaaaggcgagugaggucuaagagauu

SEQ ID NO: 20596 - RNA, 37 nt, Artificial Sequence
  Description of Artificial Sequence:  Enzymatic Nucleic Acid
agcauuaggccgaaaggcgagugaggucuuugcaaga

SEQ ID NO: 20597 - RNA, 37 nt, Artificial Sequence
  Description of Artificial Sequence:  Enzymatic Nucleic Acid
cugcugaggccgaaaggcgagugaggucuauuagcuu

SEQ ID NO: 20598 - RNA, 37 nt, Artificial Sequence
  Description of Artificial Sequence:  Enzymatic Nucleic Acid
ccauccuggccgaaaggcgagugaggucuugagcauu

SEQ ID NO: 20599 - RNA, 37 nt, Artificial Sequence
  Description of Artificial Sequence:  Enzymatic Nucleic Acid
agucuuuggccgaaaggcgagugaggucucauccugc

SEQ ID NO: 20600 - RNA, 37 nt, Artificial Sequence
  Description of Artificial Sequence:  Enzymatic Nucleic Acid
cggaagaagccgaaaggcgagugaggucuaauguagu

SEQ ID NO: 20601 - RNA, 37 nt, Artificial Sequence
  Description of Artificial Sequence:  Enzymatic Nucleic Acid
cuuccauggccgaaaggcgagugaggucuucaaaguc

SEQ ID NO: 20602 - RNA, 37 nt, Artificial Sequence
  Description of Artificial Sequence:  Enzymatic Nucleic Acid
gagguagggccgaaaggcgagugaggucuagagagag

SEQ ID NO: 20603 - RNA, 37 nt, Artificial Sequence
  Description of Artificial Sequence:  Enzymatic Nucleic Acid
acaggaaagccgaaaggcgagugaggucuaggugagg

SEQ ID NO: 20604 - RNA, 37 nt, Artificial Sequence
  Description of Artificial Sequence:  Enzymatic Nucleic Acid
ccuccauagccgaaaggcgagugaggucuaggaaaca

SEQ ID NO: 20605 - RNA, 37 nt, Artificial Sequence
  Description of Artificial Sequence:  Enzymatic Nucleic Acid
gucacauagccgaaaggcgagugaggucuuuccuccu

SEQ ID NO: 20606 - RNA, 37 nt, Artificial Sequence
  Description of Artificial Sequence:  Enzymatic Nucleic Acid
uggggucagccgaaaggcgagugaggucuauacuucc

SEQ ID NO: 20607 - RNA, 37 nt, Artificial Sequence
  Description of Artificial Sequence:  Enzymatic Nucleic Acid
gauuccuggccgaaaggcgagugaggucuuguguugu

SEQ ID NO: 20608 - RNA, 37 nt, Artificial Sequence
  Description of Artificial Sequence:  Enzymatic Nucleic Acid
gauacugagccgaaaggcgagugaggucuugauuccu

SEQ ID NO: 20609 - RNA, 37 nt, Artificial Sequence
  Description of Artificial Sequence:  Enzymatic Nucleic Acid
ugcagauagccgaaaggcgagugaggucuugacugau

SEQ ID NO: 20610 - RNA, 37 nt, Artificial Sequence
  Description of Artificial Sequence:  Enzymatic Nucleic Acid
cuguucuggccgaaaggcgagugaggucuagauacug

SEQ ID NO: 20611 - RNA, 37 nt, Artificial Sequence
  Description of Artificial Sequence:  Enzymatic Nucleic Acid
uucgcuuagccgaaaggcgagugaggucuuguucugc

SEQ ID NO: 20612 - RNA, 37 nt, Artificial Sequence
  Description of Artificial Sequence:  Enzymatic Nucleic Acid
cucuuucggccgaaaggcgagugaggucuuuacuguu

SEQ ID NO: 20613 - RNA, 37 nt, Artificial Sequence
  Description of Artificial Sequence:  Enzymatic Nucleic Acid
caggccgggccgaaaggcgagugaggucuucuuucgc

SEQ ID NO: 20614 - RNA, 37 nt, Artificial Sequence
  Description of Artificial Sequence:  Enzymatic Nucleic Acid
cucacagggccgaaaggcgagugaggucucggcucuu

SEQ ID NO: 20615 - RNA, 37 nt, Artificial Sequence
  Description of Artificial Sequence:  Enzymatic Nucleic Acid
uacacucagccgaaaggcgagugaggucuaggccggc

SEQ ID NO: 20616 - RNA, 37 nt, Artificial Sequence
  Description of Artificial Sequence:  Enzymatic Nucleic Acid
uuuuuacagccgaaaggcgagugaggucuucacaggc

SEQ ID NO: 20617 - RNA, 37 nt, Artificial Sequence
  Description of Artificial Sequence:  Enzymatic Nucleic Acid
uguuuuuagccgaaaggcgagugaggucuacucacag

SEQ ID NO: 20618 - RNA, 37 nt, Artificial Sequence
  Description of Artificial Sequence:  Enzymatic Nucleic Acid
ucuucuaagccgaaaggcgagugaggucugggauauc

SEQ ID NO: 20619 - RNA, 37 nt, Artificial Sequence
  Description of Artificial Sequence:  Enzymatic Nucleic Acid
uacuuuuagccgaaaggcgagugaggucuuucugguu

SEQ ID NO: 20620 - RNA, 37 nt, Artificial Sequence
  Description of Artificial Sequence:  Enzymatic Nucleic Acid
ugggauuagccgaaaggcgagugaggucuuuuuacuu

SEQ ID NO: 20621 - RNA, 37 nt, Artificial Sequence
  Description of Artificial Sequence:  Enzymatic Nucleic Acid
ccauaccagccgaaaggcgagugaggucuuguccguc

SEQ ID NO: 20622 - RNA, 37 nt, Artificial Sequence
  Description of Artificial Sequence:  Enzymatic Nucleic Acid
gaaccauagccgaaaggcgagugaggucucacugucc

SEQ ID NO: 20623 - RNA, 37 nt, Artificial Sequence
  Description of Artificial Sequence:  Enzymatic Nucleic Acid
ggcaagaagccgaaaggcgagugaggucucauaccac

SEQ ID NO: 20624 - RNA, 37 nt, Artificial Sequence
  Description of Artificial Sequence:  Enzymatic Nucleic Acid
uucugagggccgaaaggcgagugaggucuaagaacca

SEQ ID NO: 20625 - RNA, 37 nt, Artificial Sequence
  Description of Artificial Sequence:  Enzymatic Nucleic Acid
guuuucaggccgaaaggcgagugaggucuucuucuga

SEQ ID NO: 20626 - RNA, 37 nt, Artificial Sequence
  Description of Artificial Sequence:  Enzymatic Nucleic Acid
ccauuccagccgaaaggcgagugaggucucaaaagau

SEQ ID NO: 20627 - RNA, 37 nt, Artificial Sequence
  Description of Artificial Sequence:  Enzymatic Nucleic Acid
gcugggcagccgaaaggcgagugaggucucauuccac

SEQ ID NO: 20628 - RNA, 37 nt, Artificial Sequence
  Description of Artificial Sequence:  Enzymatic Nucleic Acid
uugcuggggccgaaaggcgagugaggucuaccauucc

SEQ ID NO: 20629 - RNA, 37 nt, Artificial Sequence
  Description of Artificial Sequence:  Enzymatic Nucleic Acid
ugcuuuuggccgaaaggcgagugaggucuugggcacc

SEQ ID NO: 20630 - RNA, 37 nt, Artificial Sequence
  Description of Artificial Sequence:  Enzymatic Nucleic Acid
acucccuggccgaaaggcgagugaggucuuuuugcug

SEQ ID NO: 20631 - RNA, 37 nt, Artificial Sequence
  Description of Artificial Sequence:  Enzymatic Nucleic Acid
gccacagagccgaaaggcgagugaggucuucccugcu

SEQ ID NO: 20632 - RNA, 37 nt, Artificial Sequence
  Description of Artificial Sequence:  Enzymatic Nucleic Acid
agaugccagccgaaaggcgagugaggucuagacuccc

SEQ ID NO: 20633 - RNA, 37 nt, Artificial Sequence
  Description of Artificial Sequence:  Enzymatic Nucleic Acid
uucagauggccgaaaggcgagugaggucucacagacu

SEQ ID NO: 20634 - RNA, 37 nt, Artificial Sequence
  Description of Artificial Sequence:  Enzymatic Nucleic Acid
gguuugaggccgaaaggcgagugaggucucuucagau

SEQ ID NO: 20635 - RNA, 37 nt, Artificial Sequence
  Description of Artificial Sequence:  Enzymatic Nucleic Acid
gguagccggccgaaaggcgagugaggucuuugucugg

SEQ ID NO: 20636 - RNA, 37 nt, Artificial Sequence
  Description of Artificial Sequence:  Enzymatic Nucleic Acid
acugguaggccgaaaggcgagugaggucucgcuuguc

SEQ ID NO: 20637 - RNA, 37 nt, Artificial Sequence
  Description of Artificial Sequence:  Enzymatic Nucleic Acid
uauccggagccgaaaggcgagugaggucuugguagcc

SEQ ID NO: 20638 - RNA, 37 nt, Artificial Sequence
  Description of Artificial Sequence:  Enzymatic Nucleic Acid
ggaguacagccgaaaggcgagugaggucugguggugu

SEQ ID NO: 20639 - RNA, 37 nt, Artificial Sequence
  Description of Artificial Sequence:  Enzymatic Nucleic Acid
cuggaguagccgaaaggcgagugaggucuacgguggu

SEQ ID NO: 20640 - RNA, 37 nt, Artificial Sequence
  Description of Artificial Sequence:  Enzymatic Nucleic Acid
cuuccucagccgaaaggcgagugaggucuuggaguac

SEQ ID NO: 20641 - RNA, 37 nt, Artificial Sequence
  Description of Artificial Sequence:  Enzymatic Nucleic Acid
aaguucuggccgaaaggcgagugaggucuuuccucac

SEQ ID NO: 20642 - RNA, 37 nt, Artificial Sequence
  Description of Artificial Sequence:  Enzymatic Nucleic Acid
ucuaucaggccgaaaggcgagugaggucuuuuaaaag

SEQ ID NO: 20643 - RNA, 37 nt, Artificial Sequence
  Description of Artificial Sequence:  Enzymatic Nucleic Acid
gguuugcagccgaaaggcgagugaggucuuccaaucu

SEQ ID NO: 20644 - RNA, 37 nt, Artificial Sequence
  Description of Artificial Sequence:  Enzymatic Nucleic Acid
ccgguuuggccgaaaggcgagugaggucuacuccaau

SEQ ID NO: 20645 - RNA, 37 nt, Artificial Sequence
  Description of Artificial Sequence:  Enzymatic Nucleic Acid
cugugcuagccgaaaggcgagugaggucucgguuugc

SEQ ID NO: 20646 - RNA, 37 nt, Artificial Sequence
  Description of Artificial Sequence:  Enzymatic Nucleic Acid
gggcuguggccgaaaggcgagugaggucuuaccgguu

SEQ ID NO: 20647 - RNA, 37 nt, Artificial Sequence
  Description of Artificial Sequence:  Enzymatic Nucleic Acid
aaucuggggccgaaaggcgagugaggucuugugcuac

SEQ ID NO: 20648 - RNA, 37 nt, Artificial Sequence
  Description of Artificial Sequence:  Enzymatic Nucleic Acid
gagucagggccgaaaggcgagugaggucuuggagaau

SEQ ID NO: 20649 - RNA, 37 nt, Artificial Sequence
  Description of Artificial Sequence:  Enzymatic Nucleic Acid
gaggagaggccgaaaggcgagugaggucuucagugug

SEQ ID NO: 20650 - RNA, 37 nt, Artificial Sequence
  Description of Artificial Sequence:  Enzymatic Nucleic Acid
cuuuuaaagccgaaaggcgagugaggucuaggaggag

SEQ ID NO: 20651 - RNA, 37 nt, Artificial Sequence
  Description of Artificial Sequence:  Enzymatic Nucleic Acid
uguggauggccgaaaggcgagugaggucuuuccuuuu

SEQ ID NO: 20652 - RNA, 37 nt, Artificial Sequence
  Description of Artificial Sequence:  Enzymatic Nucleic Acid
ugagcagagccgaaaggcgagugaggucucucucaug

SEQ ID NO: 20653 - RNA, 37 nt, Artificial Sequence
  Description of Artificial Sequence:  Enzymatic Nucleic Acid
aaucugaggccgaaaggcgagugaggucuagaccucu

SEQ ID NO: 20654 - RNA, 37 nt, Artificial Sequence
  Description of Artificial Sequence:  Enzymatic Nucleic Acid
gaacaacagccgaaaggcgagugaggucuuucaaaau

SEQ ID NO: 20655 - RNA, 37 nt, Artificial Sequence
  Description of Artificial Sequence:  Enzymatic Nucleic Acid
aagaacaagccgaaaggcgagugaggucuacuucaaa

SEQ ID NO: 20656 - RNA, 37 nt, Artificial Sequence
  Description of Artificial Sequence:  Enzymatic Nucleic Acid
ggaaagaagccgaaaggcgagugaggucuaacacuuc

SEQ ID NO: 20657 - RNA, 37 nt, Artificial Sequence
  Description of Artificial Sequence:  Enzymatic Nucleic Acid
acuuccuggccgaaaggcgagugaggucuugguggaa

SEQ ID NO: 20658 - RNA, 37 nt, Artificial Sequence
  Description of Artificial Sequence:  Enzymatic Nucleic Acid
ugcggcuagccgaaaggcgagugaggucuuuccugcu

SEQ ID NO: 20659 - RNA, 37 nt, Artificial Sequence
  Description of Artificial Sequence:  Enzymatic Nucleic Acid
aaaugcgggccgaaaggcgagugaggucuuacuuccu

SEQ ID NO: 20660 - RNA, 37 nt, Artificial Sequence
  Description of Artificial Sequence:  Enzymatic Nucleic Acid
aucaaauggccgaaaggcgagugaggucuggcuacuu

SEQ ID NO: 20661 - RNA, 37 nt, Artificial Sequence
  Description of Artificial Sequence:  Enzymatic Nucleic Acid
gcucccuggccgaaaggcgagugaggucuaguccgag

SEQ ID NO: 20662 - RNA, 37 nt, Artificial Sequence
  Description of Artificial Sequence:  Enzymatic Nucleic Acid
aagacugggccgaaaggcgagugaggucuucccugca

SEQ ID NO: 20663 - RNA, 37 nt, Artificial Sequence
  Description of Artificial Sequence:  Enzymatic Nucleic Acid
cuagaagagccgaaaggcgagugaggucuuggcuccc

SEQ ID NO: 20664 - RNA, 37 nt, Artificial Sequence
  Description of Artificial Sequence:  Enzymatic Nucleic Acid
aggauauggccgaaaggcgagugaggucucuagaaga

SEQ ID NO: 20665 - RNA, 37 nt, Artificial Sequence
  Description of Artificial Sequence:  Enzymatic Nucleic Acid
gucacaaggccgaaaggcgagugaggucucucuucca

SEQ ID NO: 20666 - RNA, 37 nt, Artificial Sequence
  Description of Artificial Sequence:  Enzymatic Nucleic Acid
uugggucagccgaaaggcgagugaggucuaagccucu

SEQ ID NO: 20667 - RNA, 37 nt, Artificial Sequence
  Description of Artificial Sequence:  Enzymatic Nucleic Acid
cacagacagccgaaaggcgagugaggucuauucuugg

SEQ ID NO: 20668 - RNA, 37 nt, Artificial Sequence
  Description of Artificial Sequence:  Enzymatic Nucleic Acid
gacacagagccgaaaggcgagugaggucuacauucuu

SEQ ID NO: 20669 - RNA, 37 nt, Artificial Sequence
  Description of Artificial Sequence:  Enzymatic Nucleic Acid
agaagacagccgaaaggcgagugaggucuagacacau

SEQ ID NO: 20670 - RNA, 37 nt, Artificial Sequence
  Description of Artificial Sequence:  Enzymatic Nucleic Acid
ggagaagagccgaaaggcgagugaggucuacagacac

SEQ ID NO: 20671 - RNA, 37 nt, Artificial Sequence
  Description of Artificial Sequence:  Enzymatic Nucleic Acid
ggucaacagccgaaaggcgagugaggucuugggagaa

SEQ ID NO: 20672 - RNA, 37 nt, Artificial Sequence
  Description of Artificial Sequence:  Enzymatic Nucleic Acid
caggucaagccgaaaggcgagugaggucuacugggag

SEQ ID NO: 20673 - RNA, 37 nt, Artificial Sequence
  Description of Artificial Sequence:  Enzymatic Nucleic Acid
ugauaauggccgaaaggcgagugaggucuuuuuuaaa

SEQ ID NO: 20674 - RNA, 37 nt, Artificial Sequence
  Description of Artificial Sequence:  Enzymatic Nucleic Acid
agcagggggccgaaaggcgagugaggucuaugauaau

SEQ ID NO: 20675 - RNA, 37 nt, Artificial Sequence
  Description of Artificial Sequence:  Enzymatic Nucleic Acid
acccgcaggccgaaaggcgagugaggucuaggggcau

SEQ ID NO: 20676 - RNA, 37 nt, Artificial Sequence
  Description of Artificial Sequence:  Enzymatic Nucleic Acid
gagacccggccgaaaggcgagugaggucuagcagggg

SEQ ID NO: 20677 - RNA, 37 nt, Artificial Sequence
  Description of Artificial Sequence:  Enzymatic Nucleic Acid
uggugagagccgaaaggcgagugaggucuccgcagca

SEQ ID NO: 20678 - RNA, 37 nt, Artificial Sequence
  Description of Artificial Sequence:  Enzymatic Nucleic Acid
guucuaaagccgaaaggcgagugaggucuccauggug

SEQ ID NO: 20679 - RNA, 37 nt, Artificial Sequence
  Description of Artificial Sequence:  Enzymatic Nucleic Acid
gcuugaaggccgaaaggcgagugaggucuucuuuguu

SEQ ID NO: 20680 - RNA, 37 nt, Artificial Sequence
  Description of Artificial Sequence:  Enzymatic Nucleic Acid
ggccauuggccgaaaggcgagugaggucuuugaagcu

SEQ ID NO: 20681 - RNA, 37 nt, Artificial Sequence
  Description of Artificial Sequence:  Enzymatic Nucleic Acid
ggaugggggccgaaaggcgagugaggucucauugcuu

SEQ ID NO: 20682 - RNA, 37 nt, Artificial Sequence
  Description of Artificial Sequence:  Enzymatic Nucleic Acid
uacugcuagccgaaaggcgagugaggucuuucuuuga

SEQ ID NO: 20683 - RNA, 37 nt, Artificial Sequence
  Description of Artificial Sequence:  Enzymatic Nucleic Acid
agguacuggccgaaaggcgagugaggucuuacuucuu

SEQ ID NO: 20684 - RNA, 37 nt, Artificial Sequence
  Description of Artificial Sequence:  Enzymatic Nucleic Acid
cccagguagccgaaaggcgagugaggucuugcuacuu

SEQ ID NO: 20685 - RNA, 37 nt, Artificial Sequence
  Description of Artificial Sequence:  Enzymatic Nucleic Acid
agugucaggccgaaaggcgagugaggucuuccccagg

SEQ ID NO: 20686 - RNA, 37 nt, Artificial Sequence
  Description of Artificial Sequence:  Enzymatic Nucleic Acid
uaguuuuagccgaaaggcgagugaggucuagaagugu

SEQ ID NO: 20687 - RNA, 37 nt, Artificial Sequence
  Description of Artificial Sequence:  Enzymatic Nucleic Acid
uuacguuggccgaaaggcgagugaggucucugguuua

SEQ ID NO: 20688 - RNA, 37 nt, Artificial Sequence
  Description of Artificial Sequence:  Enzymatic Nucleic Acid
aacacuuagccgaaaggcgagugaggucuguugccug

SEQ ID NO: 20689 - RNA, 37 nt, Artificial Sequence
  Description of Artificial Sequence:  Enzymatic Nucleic Acid
cucgaacagccgaaaggcgagugaggucuuuacguug

SEQ ID NO: 20690 - RNA, 37 nt, Artificial Sequence
  Description of Artificial Sequence:  Enzymatic Nucleic Acid
accucgaagccgaaaggcgagugaggucuacuuacgu

SEQ ID NO: 20691 - RNA, 37 nt, Artificial Sequence
  Description of Artificial Sequence:  Enzymatic Nucleic Acid
cuucaacagccgaaaggcgagugaggucucucgaaca

SEQ ID NO: 20692 - RNA, 37 nt, Artificial Sequence
  Description of Artificial Sequence:  Enzymatic Nucleic Acid
aucuucaagccgaaaggcgagugaggucuaccucgaa

SEQ ID NO: 20693 - RNA, 37 nt, Artificial Sequence
  Description of Artificial Sequence:  Enzymatic Nucleic Acid
cagcccuggccgaaaggcgagugaggucuaaauccuu

SEQ ID NO: 20694 - RNA, 37 nt, Artificial Sequence
  Description of Artificial Sequence:  Enzymatic Nucleic Acid
agacucaggccgaaaggcgagugaggucuccugcaaa

SEQ ID NO: 20695 - RNA, 37 nt, Artificial Sequence
  Description of Artificial Sequence:  Enzymatic Nucleic Acid
uggauagagccgaaaggcgagugaggucuucagcccu

SEQ ID NO: 20696 - RNA, 37 nt, Artificial Sequence
  Description of Artificial Sequence:  Enzymatic Nucleic Acid
aaacaaaggccgaaaggcgagugaggucucucuugga

SEQ ID NO: 20697 - RNA, 37 nt, Artificial Sequence
  Description of Artificial Sequence:  Enzymatic Nucleic Acid
guccuaaagccgaaaggcgagugaggucuaaagccuc

SEQ ID NO: 20698 - RNA, 37 nt, Artificial Sequence
  Description of Artificial Sequence:  Enzymatic Nucleic Acid
gggacccagccgaaaggcgagugaggucuguccuaaa

SEQ ID NO: 20699 - RNA, 37 nt, Artificial Sequence
  Description of Artificial Sequence:  Enzymatic Nucleic Acid
gcuugggagccgaaaggcgagugaggucuccacgucc

SEQ ID NO: 20700 - RNA, 37 nt, Artificial Sequence
  Description of Artificial Sequence:  Enzymatic Nucleic Acid
aggcuugggccgaaaggcgagugaggucuuugggacc

SEQ ID NO: 20701 - RNA, 37 nt, Artificial Sequence
  Description of Artificial Sequence:  Enzymatic Nucleic Acid
acuuaagggccgaaaggcgagugaggucuuuggcuug

SEQ ID NO: 20702 - RNA, 37 nt, Artificial Sequence
  Description of Artificial Sequence:  Enzymatic Nucleic Acid
auuccacagccgaaaggcgagugaggucuuuaaggcu

SEQ ID NO: 20703 - RNA, 37 nt, Artificial Sequence
  Description of Artificial Sequence:  Enzymatic Nucleic Acid
gaauuccagccgaaaggcgagugaggucuacuuaagg

SEQ ID NO: 20704 - RNA, 37 nt, Artificial Sequence
  Description of Artificial Sequence:  Enzymatic Nucleic Acid
caagguaagccgaaaggcgagugaggucuguuagucu

SEQ ID NO: 20705 - RNA, 37 nt, Artificial Sequence
  Description of Artificial Sequence:  Enzymatic Nucleic Acid
cuccaaaggccgaaaggcgagugaggucuaagguaac

SEQ ID NO: 20706 - RNA, 37 nt, Artificial Sequence
  Description of Artificial Sequence:  Enzymatic Nucleic Acid
cuccaguagccgaaaggcgagugaggucuucuccaaa

SEQ ID NO: 20707 - RNA, 37 nt, Artificial Sequence
  Description of Artificial Sequence:  Enzymatic Nucleic Acid
uuugcagggccgaaaggcgagugaggucuuccaguac

SEQ ID NO: 20708 - RNA, 37 nt, Artificial Sequence
  Description of Artificial Sequence:  Enzymatic Nucleic Acid
ugcauuuggccgaaaggcgagugaggucuaggcucca

SEQ ID NO: 20709 - RNA, 37 nt, Artificial Sequence
  Description of Artificial Sequence:  Enzymatic Nucleic Acid
acacaauggccgaaaggcgagugaggucuauuugcag

SEQ ID NO: 20710 - RNA, 37 nt, Artificial Sequence
  Description of Artificial Sequence:  Enzymatic Nucleic Acid
agcaaacagccgaaaggcgagugaggucuaaugcauu

SEQ ID NO: 20711 - RNA, 37 nt, Artificial Sequence
  Description of Artificial Sequence:  Enzymatic Nucleic Acid
agagcaaagccgaaaggcgagugaggucuacaaugca

SEQ ID NO: 20712 - RNA, 37 nt, Artificial Sequence
  Description of Artificial Sequence:  Enzymatic Nucleic Acid
caccagaggccgaaaggcgagugaggucuaaacacaa

SEQ ID NO: 20713 - RNA, 37 nt, Artificial Sequence
  Description of Artificial Sequence:  Enzymatic Nucleic Acid
caccuccagccgaaaggcgagugaggucucagagcaa

SEQ ID NO: 20714 - RNA, 37 nt, Artificial Sequence
  Description of Artificial Sequence:  Enzymatic Nucleic Acid
caugcccagccgaaaggcgagugaggucucuccacca

SEQ ID NO: 20715 - RNA, 37 nt, Artificial Sequence
  Description of Artificial Sequence:  Enzymatic Nucleic Acid
accccauggccgaaaggcgagugaggucuccaccucc

SEQ ID NO: 20716 - RNA, 37 nt, Artificial Sequence
  Description of Artificial Sequence:  Enzymatic Nucleic Acid
agaacagagccgaaaggcgagugaggucucccaugcc

SEQ ID NO: 20717 - RNA, 37 nt, Artificial Sequence
  Description of Artificial Sequence:  Enzymatic Nucleic Acid
uuucagaagccgaaaggcgagugaggucuagacccca

SEQ ID NO: 20718 - RNA, 37 nt, Artificial Sequence
  Description of Artificial Sequence:  Enzymatic Nucleic Acid
acccuuuagccgaaaggcgagugaggucuauuucaga

SEQ ID NO: 20719 - RNA, 37 nt, Artificial Sequence
  Description of Artificial Sequence:  Enzymatic Nucleic Acid
cgucugaagccgaaaggcgagugaggucuccuuuaca

SEQ ID NO: 20720 - RNA, 37 nt, Artificial Sequence
  Description of Artificial Sequence:  Enzymatic Nucleic Acid
accagaaagccgaaaggcgagugaggucucccgucug

SEQ ID NO: 20721 - RNA, 37 nt, Artificial Sequence
  Description of Artificial Sequence:  Enzymatic Nucleic Acid
uucuaaaagccgaaaggcgagugaggucucagaaacc

SEQ ID NO: 20722 - RNA, 37 nt, Artificial Sequence
  Description of Artificial Sequence:  Enzymatic Nucleic Acid
acacgcaagccgaaaggcgagugaggucucuucuaaa

SEQ ID NO: 20723 - RNA, 37 nt, Artificial Sequence
  Description of Artificial Sequence:  Enzymatic Nucleic Acid
agaacacggccgaaaggcgagugaggucuaaccuucu

SEQ ID NO: 20724 - RNA, 37 nt, Artificial Sequence
  Description of Artificial Sequence:  Enzymatic Nucleic Acid
gaagaacagccgaaaggcgagugaggucugcaaccuu

SEQ ID NO: 20725 - RNA, 37 nt, Artificial Sequence
  Description of Artificial Sequence:  Enzymatic Nucleic Acid
ucgaagaagccgaaaggcgagugaggucuacgcaacc

SEQ ID NO: 20726 - RNA, 37 nt, Artificial Sequence
  Description of Artificial Sequence:  Enzymatic Nucleic Acid
uagcccaagccgaaaggcgagugaggucuucgaagaa

SEQ ID NO: 20727 - RNA, 37 nt, Artificial Sequence
  Description of Artificial Sequence:  Enzymatic Nucleic Acid
uacuuuaggccgaaaggcgagugaggucuccaacucg

SEQ ID NO: 20728 - RNA, 37 nt, Artificial Sequence
  Description of Artificial Sequence:  Enzymatic Nucleic Acid
gaacucuagccgaaaggcgagugaggucuuuuagccc

SEQ ID NO: 20729 - RNA, 37 nt, Artificial Sequence
  Description of Artificial Sequence:  Enzymatic Nucleic Acid
acaacgaagccgaaaggcgagugaggucuucuacuuu

SEQ ID NO: 20730 - RNA, 37 nt, Artificial Sequence
  Description of Artificial Sequence:  Enzymatic Nucleic Acid
cagcacaagccgaaaggcgagugaggucugaacucua

SEQ ID NO: 20731 - RNA, 37 nt, Artificial Sequence
  Description of Artificial Sequence:  Enzymatic Nucleic Acid
aaacagcagccgaaaggcgagugaggucuaacgaacu

SEQ ID NO: 20732 - RNA, 37 nt, Artificial Sequence
  Description of Artificial Sequence:  Enzymatic Nucleic Acid
agaaacaggccgaaaggcgagugaggucuacaacgaa

SEQ ID NO: 20733 - RNA, 37 nt, Artificial Sequence
  Description of Artificial Sequence:  Enzymatic Nucleic Acid
gucagaaagccgaaaggcgagugaggucuagcacaac

SEQ ID NO: 20734 - RNA, 37 nt, Artificial Sequence
  Description of Artificial Sequence:  Enzymatic Nucleic Acid
ggaaggaagccgaaaggcgagugaggucuucucauua

SEQ ID NO: 20735 - RNA, 37 nt, Artificial Sequence
  Description of Artificial Sequence:  Enzymatic Nucleic Acid
acagcuaagccgaaaggcgagugaggucuggucugga

SEQ ID NO: 20736 - RNA, 37 nt, Artificial Sequence
  Description of Artificial Sequence:  Enzymatic Nucleic Acid
ggagacaggccgaaaggcgagugaggucuuaacgguc

SEQ ID NO: 20737 - RNA, 37 nt, Artificial Sequence
  Description of Artificial Sequence:  Enzymatic Nucleic Acid
caaggagagccgaaaggcgagugaggucuagcuaacg

SEQ ID NO: 20738 - RNA, 37 nt, Artificial Sequence
  Description of Artificial Sequence:  Enzymatic Nucleic Acid
gggcuugggccgaaaggcgagugaggucuaaggagac

SEQ ID NO: 20739 - RNA, 37 nt, Artificial Sequence
  Description of Artificial Sequence:  Enzymatic Nucleic Acid
uccugggggccgaaaggcgagugaggucuuuggcaag

SEQ ID NO: 20740 - RNA, 37 nt, Artificial Sequence
  Description of Artificial Sequence:  Enzymatic Nucleic Acid
cagagcuggccgaaaggcgagugaggucuaucauuuu

SEQ ID NO: 20741 - RNA, 37 nt, Artificial Sequence
  Description of Artificial Sequence:  Enzymatic Nucleic Acid
agccagaggccgaaaggcgagugaggucuugcaucau

SEQ ID NO: 20742 - RNA, 37 nt, Artificial Sequence
  Description of Artificial Sequence:  Enzymatic Nucleic Acid
acaaggaggccgaaaggcgagugaggucucagagcug

SEQ ID NO: 20743 - RNA, 37 nt, Artificial Sequence
  Description of Artificial Sequence:  Enzymatic Nucleic Acid
cugggagagccgaaaggcgagugaggucuaaggagcc

SEQ ID NO: 20744 - RNA, 37 nt, Artificial Sequence
  Description of Artificial Sequence:  Enzymatic Nucleic Acid
aggaucaggccgaaaggcgagugaggucucugggaga

SEQ ID NO: 20745 - RNA, 37 nt, Artificial Sequence
  Description of Artificial Sequence:  Enzymatic Nucleic Acid
gccuugaggccgaaaggcgagugaggucuugaauguc

SEQ ID NO: 20746 - RNA, 37 nt, Artificial Sequence
  Description of Artificial Sequence:  Enzymatic Nucleic Acid
gcagggaggccgaaaggcgagugaggucucuugagcu

SEQ ID NO: 20747 - RNA, 37 nt, Artificial Sequence
  Description of Artificial Sequence:  Enzymatic Nucleic Acid
caacacgggccgaaaggcgagugaggucuagggagcc

SEQ ID NO: 20748 - RNA, 37 nt, Artificial Sequence
  Description of Artificial Sequence:  Enzymatic Nucleic Acid
cuucaacagccgaaaggcgagugaggucuggcaggga

SEQ ID NO: 20749 - RNA, 37 nt, Artificial Sequence
  Description of Artificial Sequence:  Enzymatic Nucleic Acid
cucuucaagccgaaaggcgagugaggucuacggcagg

SEQ ID NO: 20750 - RNA, 37 nt, Artificial Sequence
  Description of Artificial Sequence:  Enzymatic Nucleic Acid
agucagaagccgaaaggcgagugaggucuucuucaac

SEQ ID NO: 20751 - RNA, 37 nt, Artificial Sequence
  Description of Artificial Sequence:  Enzymatic Nucleic Acid
gguuuguggccgaaaggcgagugaggucuagucagaa

SEQ ID NO: 20752 - RNA, 37 nt, Artificial Sequence
  Description of Artificial Sequence:  Enzymatic Nucleic Acid
accagaaggccgaaaggcgagugaggucuugguuugu

SEQ ID NO: 20753 - RNA, 37 nt, Artificial Sequence
  Description of Artificial Sequence:  Enzymatic Nucleic Acid
agaagaaagccgaaaggcgagugaggucucagaagcu

SEQ ID NO: 20754 - RNA, 37 nt, Artificial Sequence
  Description of Artificial Sequence:  Enzymatic Nucleic Acid
caucaggagccgaaaggcgagugaggucuagauauga

SEQ ID NO: 20755 - RNA, 37 nt, Artificial Sequence
  Description of Artificial Sequence:  Enzymatic Nucleic Acid
acauaucagccgaaaggcgagugaggucuaucaggac

SEQ ID NO: 20756 - RNA, 37 nt, Artificial Sequence
  Description of Artificial Sequence:  Enzymatic Nucleic Acid
gucucagagccgaaaggcgagugaggucuauaucaca

SEQ ID NO: 20757 - RNA, 37 nt, Artificial Sequence
  Description of Artificial Sequence:  Enzymatic Nucleic Acid
accucccggccgaaaggcgagugaggucuauucaguc

SEQ ID NO: 20758 - RNA, 37 nt, Artificial Sequence
  Description of Artificial Sequence:  Enzymatic Nucleic Acid
acauugaagccgaaaggcgagugaggucucucccgca

SEQ ID NO: 20759 - RNA, 37 nt, Artificial Sequence
  Description of Artificial Sequence:  Enzymatic Nucleic Acid
cagcuucagccgaaaggcgagugaggucuauugaacc

SEQ ID NO: 20760 - RNA, 37 nt, Artificial Sequence
  Description of Artificial Sequence:  Enzymatic Nucleic Acid
acacacaggccgaaaggcgagugaggucuuucacauu

SEQ ID NO: 20761 - RNA, 37 nt, Artificial Sequence
  Description of Artificial Sequence:  Enzymatic Nucleic Acid
accacacagccgaaaggcgagugaggucuagcuucac

SEQ ID NO: 20762 - RNA, 37 nt, Artificial Sequence
  Description of Artificial Sequence:  Enzymatic Nucleic Acid
acaccacagccgaaaggcgagugaggucuacagcuuc

SEQ ID NO: 20763 - RNA, 37 nt, Artificial Sequence
  Description of Artificial Sequence:  Enzymatic Nucleic Acid
ugacaccagccgaaaggcgagugaggucuacacagcu

SEQ ID NO: 20764 - RNA, 37 nt, Artificial Sequence
  Description of Artificial Sequence:  Enzymatic Nucleic Acid
cuuugacagccgaaaggcgagugaggucucacacaca

SEQ ID NO: 20765 - RNA, 37 nt, Artificial Sequence
  Description of Artificial Sequence:  Enzymatic Nucleic Acid
aacuuugagccgaaaggcgagugaggucuaccacaca

SEQ ID NO: 20766 - RNA, 37 nt, Artificial Sequence
  Description of Artificial Sequence:  Enzymatic Nucleic Acid
uccugaaagccgaaaggcgagugaggucuuuugacac

SEQ ID NO: 20767 - RNA, 37 nt, Artificial Sequence
  Description of Artificial Sequence:  Enzymatic Nucleic Acid
gggaagaagccgaaaggcgagugaggucuaaaagggu

SEQ ID NO: 20768 - RNA, 37 nt, Artificial Sequence
  Description of Artificial Sequence:  Enzymatic Nucleic Acid
guuggggagccgaaaggcgagugaggucuagggggaa

SEQ ID NO: 20769 - RNA, 37 nt, Artificial Sequence
  Description of Artificial Sequence:  Enzymatic Nucleic Acid
auggguuggccgaaaggcgagugaggucuggggugag

SEQ ID NO: 20770 - RNA, 37 nt, Artificial Sequence
  Description of Artificial Sequence:  Enzymatic Nucleic Acid
cuaaaauagccgaaaggcgagugaggucuugaugggu

SEQ ID NO: 20771 - RNA, 37 nt, Artificial Sequence
  Description of Artificial Sequence:  Enzymatic Nucleic Acid
ccaaauaagccgaaaggcgagugaggucuuaaaauac

SEQ ID NO: 20772 - RNA, 37 nt, Artificial Sequence
  Description of Artificial Sequence:  Enzymatic Nucleic Acid
aguagagggccgaaaggcgagugaggucucaaauaac

SEQ ID NO: 20773 - RNA, 37 nt, Artificial Sequence
  Description of Artificial Sequence:  Enzymatic Nucleic Acid
cagguuuagccgaaaggcgagugaggucuuggaguag

SEQ ID NO: 20774 - RNA, 37 nt, Artificial Sequence
  Description of Artificial Sequence:  Enzymatic Nucleic Acid
ugaacaaagccgaaaggcgagugaggucuccaaucag

SEQ ID NO: 20775 - RNA, 37 nt, Artificial Sequence
  Description of Artificial Sequence:  Enzymatic Nucleic Acid
agagugaagccgaaaggcgagugaggucuaaacccaa

SEQ ID NO: 20776 - RNA, 37 nt, Artificial Sequence
  Description of Artificial Sequence:  Enzymatic Nucleic Acid
aagucugggccgaaaggcgagugaggucuuaauaauc

SEQ ID NO: 20777 - RNA, 37 nt, Artificial Sequence
  Description of Artificial Sequence:  Enzymatic Nucleic Acid
aauuuggggccgaaaggcgagugaggucuuauaaaau

SEQ ID NO: 20778 - RNA, 37 nt, Artificial Sequence
  Description of Artificial Sequence:  Enzymatic Nucleic Acid
aaauaauagccgaaaggcgagugaggucuaauagaug

SEQ ID NO: 20779 - RNA, 37 nt, Artificial Sequence
  Description of Artificial Sequence:  Enzymatic Nucleic Acid
agaaauaggccgaaaggcgagugaggucuucuauaug

SEQ ID NO: 20780 - RNA, 37 nt, Artificial Sequence
  Description of Artificial Sequence:  Enzymatic Nucleic Acid
aacaaggggccgaaaggcgagugaggucuaaaaauca

SEQ ID NO: 20781 - RNA, 37 nt, Artificial Sequence
  Description of Artificial Sequence:  Enzymatic Nucleic Acid
ggacagaagccgaaaggcgagugaggucuaagggcaa

SEQ ID NO: 20782 - RNA, 37 nt, Artificial Sequence
  Description of Artificial Sequence:  Enzymatic Nucleic Acid
aaaaaggagccgaaaggcgagugaggucuagaacaag

SEQ ID NO: 20783 - RNA, 37 nt, Artificial Sequence
  Description of Artificial Sequence:  Enzymatic Nucleic Acid
aaaaaacagccgaaaggcgagugaggucuauuuucuu

SEQ ID NO: 20784 - RNA, 37 nt, Artificial Sequence
  Description of Artificial Sequence:  Enzymatic Nucleic Acid
acaaaaaagccgaaaggcgagugaggucuacauuuuc

SEQ ID NO: 20785 - RNA, 37 nt, Artificial Sequence
  Description of Artificial Sequence:  Enzymatic Nucleic Acid
guaccaaagccgaaaggcgagugaggucuaaaaaaca

SEQ ID NO: 20786 - RNA, 37 nt, Artificial Sequence
  Description of Artificial Sequence:  Enzymatic Nucleic Acid
cuaugguagccgaaaggcgagugaggucucaaacaaa

SEQ ID NO: 20787 - RNA, 37 nt, Artificial Sequence
  Description of Artificial Sequence:  Enzymatic Nucleic Acid
auuucacagccgaaaggcgagugaggucuuaugguac

SEQ ID NO: 20788 - RNA, 37 nt, Artificial Sequence
  Description of Artificial Sequence:  Enzymatic Nucleic Acid
gcauuucagccgaaaggcgagugaggucuacuauggu

SEQ ID NO: 20789 - RNA, 37 nt, Artificial Sequence
  Description of Artificial Sequence:  Enzymatic Nucleic Acid
guucccaggccgaaaggcgagugaggucuauuucaca

SEQ ID NO: 20790 - RNA, 37 nt, Artificial Sequence
  Description of Artificial Sequence:  Enzymatic Nucleic Acid
ugccauaggccgaaaggcgagugaggucuaugucuua

SEQ ID NO: 20791 - RNA, 37 nt, Artificial Sequence
  Description of Artificial Sequence:  Enzymatic Nucleic Acid
uauauguggccgaaaggcgagugaggucucauagcau

SEQ ID NO: 20792 - RNA, 37 nt, Artificial Sequence
  Description of Artificial Sequence:  Enzymatic Nucleic Acid
uaaacagagccgaaaggcgagugaggucuuauaaaua

SEQ ID NO: 20793 - RNA, 37 nt, Artificial Sequence
  Description of Artificial Sequence:  Enzymatic Nucleic Acid
uacauaaagccgaaaggcgagugaggucuagacuaua

SEQ ID NO: 20794 - RNA, 37 nt, Artificial Sequence
  Description of Artificial Sequence:  Enzymatic Nucleic Acid
uguuucuagccgaaaggcgagugaggucuauaaacag

SEQ ID NO: 20795 - RNA, 37 nt, Artificial Sequence
  Description of Artificial Sequence:  Enzymatic Nucleic Acid
auauauuagccgaaaggcgagugaggucuauuuguuu

SEQ ID NO: 20796 - RNA, 37 nt, Artificial Sequence
  Description of Artificial Sequence:  Enzymatic Nucleic Acid
auauaagggccgaaaggcgagugaggucuuuuaauau

SEQ ID NO: 20797 - RNA, 37 nt, Artificial Sequence
  Description of Artificial Sequence:  Enzymatic Nucleic Acid
gaauaguagccgaaaggcgagugaggucuaaaguuca

SEQ ID NO: 20798 - RNA, 37 nt, Artificial Sequence
  Description of Artificial Sequence:  Enzymatic Nucleic Acid
uacugauagccgaaaggcgagugaggucuaaaaugug

SEQ ID NO: 20799 - RNA, 37 nt, Artificial Sequence
  Description of Artificial Sequence:  Enzymatic Nucleic Acid
acauaauagccgaaaggcgagugaggucuugauacaa

SEQ ID NO: 20800 - RNA, 37 nt, Artificial Sequence
  Description of Artificial Sequence:  Enzymatic Nucleic Acid
uuaugcuagccgaaaggcgagugaggucuauaauacu

SEQ ID NO: 20801 - RNA, 37 nt, Artificial Sequence
  Description of Artificial Sequence:  Enzymatic Nucleic Acid
uuguuauggccgaaaggcgagugaggucuuacauaau

SEQ ID NO: 20802 - RNA, 37 nt, Artificial Sequence
  Description of Artificial Sequence:  Enzymatic Nucleic Acid
cauuaugagccgaaaggcgagugaggucucuuuguua

SEQ ID NO: 20803 - RNA, 37 nt, Artificial Sequence
  Description of Artificial Sequence:  Enzymatic Nucleic Acid
gcugaaaggccgaaaggcgagugaggucuauuaugac

SEQ ID NO: 20804 - RNA, 37 nt, Artificial Sequence
  Description of Artificial Sequence:  Enzymatic Nucleic Acid
aucaauuggccgaaaggcgagugaggucuugaaagca

SEQ ID NO: 20805 - RNA, 37 nt, Artificial Sequence
  Description of Artificial Sequence:  Enzymatic Nucleic Acid
uaaaaugagccgaaaggcgagugaggucuaucaauug

SEQ ID NO: 20806 - RNA, 11 nt, Artificial Sequence
  Description of Artificial Sequence:  Miscellaneous substrate
  misc_feature (1)..(4): n stands for any a, c, g, or u
  misc_feature (7)..(11): n stands for any a, c, g, or u
nnnnuhnnnnn

SEQ ID NO: 20807 - RNA, 28 nt, Artificial Sequence
  Description of Artificial Sequence:  Enzymatic Nucleic Acid
  misc_feature (1)..(5): n stands for any a, c, g, or u
  misc_feature (13)..(18): n stands for any a, c, g, or u
  misc_feature (24)..(27): n stands for any a, c, g, or u
nnnnncugangagnnnnnncgaaannnn

SEQ ID NO: 20808 - RNA, 15 nt, Artificial Sequence
  Description of Artificial Sequence:  Miscellaneous substrate
  misc_feature (1)..(7): n stands for any a, c, g, or u
  misc_feature (9)..(9): n stands for any a, c, g, or u
  misc_feature (13)..(15): n stands for any a, c, g, or u
nnnnnnnynghynnn

SEQ ID NO: 20809 - RNA, 47 nt, Artificial Sequence
  Description of Artificial Sequence:  Enzymatic Nucleic Acid
  misc_feature (1)..(4): n stands for any a, c, g, or u
  misc_feature (9)..(19): n stands for any a, c, g, or u
  misc_feature (25)..(31): n stands for any a, c, g, or u
  misc_feature (39)..(47): n stands for any a, c, g, or u
nnnngaagnnnnnnnnnnnaaahannnnnnnacauuacnnnnnnnnn

SEQ ID NO: 20810 - RNA, 85 nt, Artificial Sequence
  Description of Artificial Sequence:  Enzymatic Nucleic Acid
uggccggcauggucccagccuccucgcuggcgccggcugggcaacauuccgaggggaccguccccucgguaauggcgaaugggac

SEQ ID NO: 20811 - RNA, 176 nt, Artificial Sequence
  Description of Artificial Sequence:  Enzymatic Nucleic Acid
gggaaagcuugcgaagggcgucgucgccccgagcgguaguaagcagggaacucaccuccaauuucaguacugaaauugucguagcaguugacuacuguuaugugauugguagaggcuaagugacgguauuggcguaagucaguauugcagcacagcacaagcccgcuugcgagaau

SEQ ID NO: 20812 - RNA, 15 nt, Artificial Sequence
  Description of Artificial Sequence:  flt-1 substrate
guaugguuaaaagau

SEQ ID NO: 20813 - RNA, 34 nt, Artificial Sequence
  Description of Artificial Sequence:  Enzymatic Nucleic Acid
  misc_feature (1)..(4): Phosphorothioate 3'-Internucleotide Linkage
  misc_feature (1)..(8): 2'-O-Methyl
  misc_feature (14)..(24): 2'-O-Methyl
  misc_feature (26)..(27): 2'-O-Methyl
  misc_feature (29)..(34): 2'-O-Methyl
  misc_feature (9)..(9): 2'-deoxy-2'-amino
  misc_feature (12)..(12): 2'-deoxy-2'-amino
aucuuuucugaugaggcgaaagccgaaaccauac

SEQ ID NO: 20814 - RNA, 36 nt, Artificial Sequence
  Description of Artificial Sequence:  Enzymatic Nucleic Acid
  misc_feature (2)..(5): Phosphorothioate 3'-Internucleotide Linkage
  misc_feature (1)..(8): 2'-O-Methyl
  misc_feature (14)..(26): 2'-O-Methyl
  misc_feature (28)..(29): 2'-O-Methyl
  misc_feature (31)..(36): 2'-O-Methyl
  misc_feature (9)..(9): 2'-deoxy-2'-amino
  misc_feature (12)..(12): 2'-deoxy-2'-amino
aucuuuucugaugaggccgaaaggccgaaaccauac

SEQ ID NO: 20815 - RNA, 13 nt, Artificial Sequence
  Description of Artificial Sequence:  flt-1 substrate
cagacuacaacuc

SEQ ID NO: 20816 - RNA, 32 nt, Artificial Sequence
  Description of Artificial Sequence:  Enzymatic Nucleic Acid
  misc_feature (1)..(4): Phosphorothioate 3'-Internucleotide Linkage
  misc_feature (1)..(7): 2'-O-Methyl
  misc_feature (13)..(23): 2'-O-Methyl
  misc_feature (25)..(26): 2'-O-Methyl
  misc_feature (28)..(32): 2'-O-Methyl
  misc_feature (8)..(8): 2'-deoxy-2'-amino
  misc_feature (11)..(11): 2'-deoxy-2'-amino
gaguggcugaugaggcgaaagccgaaagucug

SEQ ID NO: 20817 - RNA, 34 nt, Artificial Sequence
  Description of Artificial Sequence:  Enzymatic Nucleic Acid
  misc_feature (1)..(4): Phosphorothioate 3'-Internucleotide Linkage
  misc_feature (1)..(7): 2'-O-Methyl
  misc_feature (13)..(25): 2'-O-Methyl
  misc_feature (27)..(28): 2'-O-Methyl
  misc_feature (30)..(34): 2'-O-Methyl
  misc_feature (8)..(8): 2'-deoxy-2'-amino
  misc_feature (11)..(11): 2'-deoxy-2'-amino
gaguugcugaugaggccgaaaggccgaaagucug

SEQ ID NO: 20818 - RNA, 35 nt, Artificial Sequence; identical to SEQ ID NO: 13494
  Description of Artificial Sequence:  Enzymatic Nucleic Acid
  misc_feature (1)..(4): Phosphorothioate 3'-Internucleotide Linkage
  misc_feature (1)..(8): 2'-O-Methyl
  misc_feature (11)..(11): 2'-O-Methyl
  misc_feature (13)..(25): 2'-O-Methyl
  misc_feature (27)..(28): 2'-O-Methyl
  misc_feature (30)..(34): 2'-O-Methyl
  misc_feature (8)..(8): 2'-deoxy-2'-C-Allyl
  misc_feature (35)..(35): n stands for inverted deoxyabasic derivative

SEQ ID NO: 20819 - RNA, 15 nt, Homo sapiens
gcgcggcgcaggcac

SEQ ID NO: 20820 - RNA, 35 nt, Artificial Sequence
  Description of Artificial Sequence:  Enzymatic Nucleic Acid
  misc_feature (1)..(7): 2'-O-Methyl
  misc_feature (9)..(15): 2'-O-Methyl
  misc_feature (19)..(19): 2'-O-Methyl
  misc_feature (21)..(21): 2'-O-Methyl
  misc_feature (23)..(23): 2'-O-Methyl
  misc_feature (26)..(26): 2'-O-Methyl
  misc_feature (28)..(35): 2'-O-Methyl
  misc_feature (1)..(4): Phosphorothioate 3'-Internucleotide Linkage
  misc_feature (17)..(17): 2'-Deoxy-2'-Amino
  misc_feature (27)..(27): 2'-Deoxy-2'-Amino
  misc_feature (36)..(36): n stands for inverted deoxyabasic derivative
gugccuggccgaaaggcgagugaggucugccgcgc

SEQ ID NO: 20821 - DNA, 16 bp, Artificial Sequence
  Description of Artificial Sequence:  DNAzyme motif
rggctagctacaacga

SEQ ID NO: 20822 - RNA, 10 nt, Artificial Sequence
  Description of Artificial Sequence:  Enzymatic Nucleic Acid Stem Loop
gccguuaggc
